(19) United States
(12) Patent Application Publication
(10) Pub. No.: US 2025/0059535 A1
(43) Pub. Date: Feb. 20, 2025

(54) OPA1 ANTISENSE OLIGOMERS FOR TREATMENT OF CONDITIONS AND DISEASES

(71) Applicant: Stoke Therapeutics, Inc., Bedford, MA (US)

(72) Inventors: Isabel Aznarez, Boston, MA (US); Kiat Huat Lim, Billerica, MA (US); Jacob Kach, Jamaica Plain, MA (US)

(21) Appl. No.: 18/658,390

(22) Filed: May 8, 2024

Related U.S. Application Data
(63) Continuation of application No. PCT/US2022/049318, filed on Nov. 8, 2022.
(60) Provisional application No. 63/277,405, filed on Nov. 9, 2021.
(60) Provisional application No. 63/277,767, filed on Nov. 10, 2021.

(51) Int. Cl. C12N 15/113

(52) U.S. Cl. CPC C12N 15/113; C12N 2310/14; C12N 2310/531; C12N 2320/33

(57) ABSTRACT

Agents that target a processed mRNA, e.g., the 5′ UTR of the processed mRNA, can modulate protein expression, e.g., via modulation of translation of the processed mRNA. Alternative splicing events in genes can lead to non-productive mRNA transcripts which in turn can lead to aberrant protein expression. Agents that target the alternative splicing events in genes can modulate the expression level of proteins. Therapeutic agents, which can modulate protein expression by targeting a processed mRNA and/or alternative splicing events, can promote functional protein expression in patients and/or inhibit aberrant protein expression. Such therapeutic agents can be used to treat a condition or disease associated with protein deficiency and/or mitochondrial function deficit.

### CROSS-REFERENCE

[0001] This application is a continuation application of International Application No. PCT/US2022/049318, filed Nov. 8, 2022, which claims the benefit of U.S. Provisional Patent Application No. 63/277,405, filed Nov. 9, 2021, and U.S. Provisional Patent Application No. 63/277,767, filed Nov. 10, 2021, each of which is incorporated herein by reference in its entirety.

### REFERENCE TO A SEQUENCE LISTING

[0002] This application contains a Sequence Listing which has been submitted electronically in XML format. The Sequence Listing XML is incorporated herein by reference. Said XML file, created on Jan. 19, 2023, is named 47991-738_601_SL.xml and is 4,398,518 bytes in size.

### BACKGROUND

[0003] Alternative splicing events in genes can lead to non-productive mRNA transcripts which in turn can lead to aberrant or reduced protein expression, and therapeutic agents which can target the alternative splicing events in genes can modulate the expression level of functional proteins in patients and/or inhibit aberrant protein expression. Such therapeutic agents can be used to treat a condition or disease caused by the protein deficiency.

[0004] Autosomal dominant optic atrophy (ADOA) is one of the most commonly diagnosed optic neuropathies. This optic nerve disease is associated with structural and functional mitochondrial deficits that lead to degeneration of the retinal ganglion cells and progressive, irreversible loss of vision. A majority of ADOA patients carry mutations in OPA1 and most mutations lead to haploinsufficiency (Lenaers G. et al. Orphanet J Rare Dis 2012). OPA1 encodes a mitochondrial GTPase with a critical role in mitochondrial fusion, ATP synthesis and apoptosis. Currently, there is no approved disease-modifying treatment for ADOA patients and there is a need for such treatments.

### SUMMARY

[0005] In some aspects, provided herein is a method of increasing expression of an OPA1 protein in a cell having a processed mRNA that encodes the OPA1 protein and that comprises a translation regulatory element that inhibits translation of the processed mRNA, the method comprising contacting an agent or a vector encoding the agent to the cell, wherein the agent modulates a structure of the translation regulatory element, thereby increasing expression of the OPA1 protein in the cell.

[0006] In some aspects, provided herein is a method of increasing expression of an OPA1 protein in a cell having a processed mRNA that encodes the OPA1 protein and that comprises a translation regulatory element that inhibits translation of the processed mRNA, the method comprising contacting an agent or a vector encoding the agent to the cell, wherein the agent (a) binds to a targeted portion of the processed mRNA; (b) modulates interaction of the translation regulatory element with a factor involved in translation of the processed mRNA; or (c) a combination of (a) and (b), thereby increasing expression of the OPA1 protein in the cell.

[0007] In some aspects, provided herein is a method of modulating expression of an OPA1 protein in a cell, the method comprising contacting an agent or a vector encoding the agent to the cell, wherein the agent comprises an antisense oligomer with at least 80% sequence identity to a sequence selected from the group consisting of SEQ ID NOs: 608-1253.

[0008] In some aspects, provided herein is a composition comprising an agent or a vector encoding the agent, wherein the agent comprises an antisense oligomer with at least 80% sequence identity to a sequence selected from the group consisting of SEQ ID NOs: 608-1253.

[0009] In some aspects, provided herein is a composition comprising a vector encoding an agent, wherein the agent comprises a polynucleic acid comprising a sequence with at least 80% sequence identity to a sequence selected from the group consisting of SEQ ID NOs: 608-1253.

[0010] In some aspects, provided herein is a composition comprising an agent, wherein the agent comprises an antisense oligomer that binds to a targeted portion of a processed mRNA that encodes OPA1 protein, wherein the targeted portion of the processed mRNA comprises at least one nucleotide of the main start codon of the processed mRNA or is within the 5′ UTR of the processed mRNA.

[0011] In some aspects, provided herein is a composition comprising a vector encoding an agent, wherein the agent comprises a polynucleic acid comprising a sequence that binds to a targeted portion of a processed mRNA that encodes OPA1 protein, wherein the targeted portion of the processed mRNA comprises at least one nucleotide of the main start codon of the processed mRNA or is within the 5′ UTR of the processed mRNA.

[0012] In some aspects, provided herein is a composition comprising an agent, wherein the agent modulates structure of a translation regulatory element of a processed mRNA that encodes an OPA1 protein, thereby increasing expression of the OPA1 protein, and wherein the translation regulatory element inhibits translation of the processed mRNA.

[0013] In some aspects, provided herein is a composition comprising a vector encoding an agent, wherein the agent modulates structure of a translation regulatory element of a processed mRNA that encodes an OPA1 protein, thereby increasing expression of the OPA1 protein, and wherein the translation regulatory element inhibits translation of the processed mRNA.

[0014] In some aspects, provided herein is a composition comprising an agent, wherein the agent increases translation of a processed mRNA in a cell, wherein the processed mRNA encodes OPA1 protein and comprises a translation regulatory element that inhibits the translation of the processed mRNA, wherein the agent modulates a structure of the translation regulatory element, thereby increasing translation efficiency and/or the rate of translation of the processed mRNA, wherein the agent (a) binds to a targeted portion of the processed mRNA; (b) modulates interaction of the translation regulatory element with a factor involved in translation of the processed mRNA; or (c) a combination of (a) and (b).

[0015] In some aspects, provided herein is a composition comprising a vector encoding an agent, wherein the agent increases translation of a processed mRNA in a cell, wherein the processed mRNA encodes OPA1 protein and comprises a translation regulatory element that inhibits the translation of the processed mRNA, wherein the agent modulates a structure of the translation regulatory element, thereby increasing translation efficiency and/or the rate of translation of the processed mRNA, wherein the agent (a) binds to a targeted portion of the processed mRNA; (b) modulates interaction of the translation regulatory element with a factor involved in translation of the processed mRNA; or (c) a combination of (a) and (b).

[0016] In some aspects, provided herein is a method of increasing expression of a target protein in a cell having a processed mRNA that encodes the target protein and comprises a translation regulatory element that inhibits translation of the processed mRNA, the method comprising delivering into the cell: (1) a first agent or a first nucleic acid sequence encoding the first agent, and (2) a second agent or a second nucleic acid sequence encoding the second agent, wherein the first agent modulates splicing of a pre-mRNA that is transcribed from an target gene that encodes the target protein, and wherein the second agent modulates a structure of the translation regulatory element of the processed mRNA that encodes the target protein, thereby increasing the expression of the target protein in the cell.

[0017] In some aspects, provided herein is a method of increasing expression of a target protein in a cell having a processed mRNA that encodes the target protein and comprises a translation regulatory element that inhibits translation of the processed mRNA, the method comprising delivering into the cell: (1) a first agent or a first nucleic acid sequence encoding the first agent, and (2) a second agent or a second nucleic acid sequence encoding the second agent, wherein the first agent modulates splicing of a pre-mRNA that is transcribed from an target gene that encodes the target protein, and wherein the second agent (a) binds to a targeted portion of the processed mRNA; (b) modulates interaction of the translation regulatory element with a factor involved in translation of the processed mRNA; or (c) a combination of (a) and (b), thereby increasing the expression of the target protein in the cell.

[0018] In some aspects, provided herein is a method of modulating expression of a target protein in a cell, wherein contacting to the cell: (1) a first agent or a first nucleic acid sequence encoding the first agent, and (2) a second agent or a second nucleic acid sequence encoding the second agent, wherein the first agent comprises a first antisense oligomer with at least 80% sequence identity to a sequence selected from the group consisting of SEQ ID NOs: 6-275 and 280-299, and the second agent comprises a second antisense oligomer that binds to 5′ UTR of a processed mRNA that encodes the target protein, and wherein the target protein is an OPA1 protein.

[0019] In some aspects, provided herein is a pharmaceutical composition, comprising (1) a first therapeutic agent or a first nucleic acid sequence encoding the first therapeutic agent, and (2) a second therapeutic agent or a second nucleic acid sequence encoding the second therapeutic agent, wherein the first therapeutic agent comprises a first antisense oligomer with at least 80% sequence identity to a sequence selected from the group consisting of SEQ ID NOs: 6-275 and 280-299, and the second therapeutic agent comprises a second antisense oligomer that binds to 5′ UTR of a processed mRNA that encodes an OPA1 protein.

[0020] In some aspects, provided herein is a composition, comprising an antisense oligomer with at least 80% sequence identity to a sequence selected from the group consisting of SEQ ID NOs: 608-1253, wherein the antisense oligomer comprises a backbone modification, a sugar moiety modification, or a combination thereof.

[0021] In some aspects, provided herein is a pharmaceutical composition comprising the composition disclosed herein, and a pharmaceutically acceptable carrier or excipient.

[0022] In some aspects, provided herein is a pharmaceutical composition, comprising a therapeutic agent or a vector encoding the therapeutic agent, and a pharmaceutically acceptable carrier or excipient, wherein the therapeutic agent modulates structure of a translation regulatory element of a processed mRNA that encodes an OPA1 protein, thereby increasing expression of the OPA1 protein, and wherein the translation regulatory element inhibits translation of the processed mRNA.

[0023] In some aspects, provided herein is a pharmaceutical composition, comprising a therapeutic agent or a vector encoding the therapeutic agent, and a pharmaceutically acceptable carrier or excipient, wherein the therapeutic agent (a) binds to a targeted portion of a processed mRNA that encodes an OPA1 protein and that comprises a translation regulatory element; (b) modulates interaction of the translation regulatory element with a factor involved in translation of the processed mRNA; or (c) a combination of (a) and (b), thereby increasing the expression of the OPA1 protein in the cell, and wherein the translation regulatory element inhibits translation of the processed mRNA.

[0024] In some aspects, provided herein is a pharmaceutical composition comprising the first therapeutic agent of the method disclosed herein, the second therapeutic agent, and a pharmaceutically acceptable excipient.

[0025] In some aspects, provided herein is a kit comprising the first therapeutic agent of the method disclosed herein in a first contained and the second therapeutic agent of the method disclosed herein in a second container.

[0026] In some aspects, provided herein is a pharmaceutical composition comprising a first vector encoding the first therapeutic agent of the method disclosed herein, a second vector encoding the second therapeutic agent, and a pharmaceutically acceptable excipient.

[0027] In some aspects, provided herein is a kit comprising a first vector the first therapeutic agent of the method disclosed herein in a first contained and a first vector the second therapeutic agent of the method disclosed herein in a second container.

[0028] In some aspects, provided herein is a pharmaceutical composition comprising a vector encoding the first therapeutic agent of the method disclosed herein and the second therapeutic agent, and a pharmaceutically acceptable excipient.

[0029] In some aspects, provided herein is a pharmaceutical composition, comprising: (1) a first therapeutic agent or a first nucleic acid sequence encoding the first therapeutic agent, (2) a second therapeutic agent or a second nucleic acid sequence encoding the second therapeutic agent, and (3) a pharmaceutically acceptable carrier or excipient, wherein the first therapeutic agent modulates splicing of a pre-mRNA that is transcribed from a target gene that encodes the target protein, and wherein the second therapeutic agent (a) binds to a targeted portion of a processed mRNA that encodes an OPA1 protein and that comprises a translation regulatory element; (b) modulates interaction of the translation regulatory element with a factor involved in translation of the processed mRNA; or (c) a combination of (a) and (b), and wherein the translation regulatory element inhibits translation of the processed mRNA.

[0030] In some aspects, provided herein is a pharmaceutical composition, comprising: (1) a first therapeutic agent or a first nucleic acid sequence encoding the first therapeutic agent, (2) a second therapeutic agent or a second nucleic acid sequence encoding the second therapeutic agent, and (3) a pharmaceutically acceptable carrier or excipient, wherein the first therapeutic agent modulates splicing of a pre-mRNA that is transcribed from a target gene that encodes the target protein, and wherein the second therapeutic agent modulates a structure of a translation regulatory element of a processed mRNA that encodes the target protein, wherein the translation regulatory element inhibits translation of the processed mRNA.

[0031] In some aspects, provided herein is a method of treating or reducing the likelihood of developing a disease or condition in a subject in need thereof by modulating expression of an OPA1 protein in a cell of the subject, comprising contacting to cells of the subject the therapeutic agent disclosed herein, or the first therapeutic agent and the second therapeutic agent disclosed herein.

### INCORPORATION BY REFERENCE

[0032] All publications, patents, and patent applications mentioned in this specification are herein incorporated by reference to the same extent as if each individual publication, patent, or patent application was specifically and individually indicated to be incorporated by reference.

### BRIEF DESCRIPTION OF THE DRAWINGS

[0033] The novel features of the disclosure are set forth with particularity in the appended claims. A better understanding of the features and advantages of the present disclosure will be obtained by reference to the following detailed description that sets forth illustrative embodiments, in which the principles of the disclosure are utilized, and the accompanying drawings of which:

[0034] FIG. 1 is a bar graph depicting the fold change of OPA1 protein level in the cells treated with exemplary ASOs according to some embodiments of the present disclosure.

[0035] FIGS. 2A, 2B, and 3 show secondary structures of the 5′ UTR region and main start codon of OPA1 transcript ENST00000361908 based on computational simulations using two different software tools. FIG. 2 discloses SEQ ID NOS 1313-1314, respectively in order of appearance. FIG. 3 discloses SEQ ID NO: 1313.

[0036] FIGS. 4-5 show the computationally predicted secondary structures of the region covering the 5′ UTR and main start codon of the OPA1 processed mRNA upon binding with exemplary ASOs ASO-U35 and ASO-U34, respectively. FIG. 4 discloses SEQ ID NO: 1313.

[0037] FIG. 5 discloses SEQ ID NO: 1313.

[0038] FIG. 6 shows the computationally predicted secondary structure of the region covering the 5′ UTR and main start codon of the OPA1 processed mRNA upon binding with exemplary ASO ASO-U33. FIG. 6 discloses SEQ ID NO: 1315.

[0039] FIGS. 7-9 show the computationally predicted secondary structures of the region covering the 5′ UTR and main start codon of the OPA1 processed mRNA upon binding with exemplary ASOs ASO-U37, ASO-U35, and ASO-U33, respectively. FIG. 7 discloses SEQ ID NO: 1313. FIG. 8 discloses SEQ ID NO: 1313. FIG. 9 discloses SEQ ID NO: 1313.

[0040] FIG. 10 shows the computationally predicted secondary structure of the region covering the 5′ UTR and main start codon of the OPA1 processed mRNA upon binding with exemplary ASO ASO-U39. FIG. 10 discloses SEQ ID NO: 1313.

[0041] FIGS. 11A-11C depict a schematic representation of a target mRNA that contains a nonsense-mediated mRNA decay-inducing exon (NMD exon mRNA) and therapeutic agent-mediated exclusion of the nonsense-mediated mRNA decay-inducing exon to increase expression of the full-length target protein or functional RNA. FIG. 11A shows a cell divided into nuclear and cytoplasmic compartments. In the nucleus, a pre-mRNA transcript of a target gene undergoes splicing to generate mRNA, and this mRNA is exported to the cytoplasm and translated into target protein. For this target gene, some fraction of the mRNA contains a nonsense-mediated mRNA decay-inducing exon (NMD exon mRNA) that is degraded in the cytoplasm, thus leading to no target protein production. FIG. 11B shows an example of the same cell divided into nuclear and cytoplasmic compartments. Treatment with a therapeutic agent, such as an antisense oligomer (ASO), promotes the exclusion of the nonsense-mediated mRNA decay-inducing exon and results in an increase in mRNA, which is in turn translated into higher levels of target protein. FIG. 11C shows an example schematic of a novel NMD exon inclusion event (Exon X) identified by the center rectangle which leads to the introduction of a premature termination codon (PTC), resulting in a non-productive mRNA transcript degraded by nonsense-mediated decay (NMD).

[0042] FIG. 12 depicts identification of an exemplary nonsense-mediated mRNA decay (NMD)-inducing exon in the OPA1 gene. The identification of the NMD-inducing exon in the OPA1 gene using RNA sequencing is shown, visualized in the UCSC genome browser. The upper panel shows a graphic representation of the OPA1 gene to scale. Peaks corresponding to RNA sequencing reads were identified in intron GRCh38/hg38: chr3 193626204 to 193631611, shown in the middle panel. Bioinformatic analysis identified an exon-like sequence (bottom panel, sequence highlighted in uppercase; GRCh38/hg38: chr3 193628509 to 193628616) flanked by 3′ and 5′ splice sites. Inclusion of this exon leads to the introduction of a premature termination codon rendering the transcript a target of NMD. FIG. 12 discloses SEQ ID NO: 300.

[0043] FIG. 13 depicts identification of an exemplary nonsense-mediated mRNA decay (NMD)-inducing exon in the OPA1 gene. The identification of the NMD-inducing exon in the OPA1 gene using RNA sequencing is shown, visualized in the UCSC genome browser. The upper panel shows a graphic representation of the OPA1 gene to scale. Peaks corresponding to RNA sequencing reads were identified in intron GRCh38/hg38: chr3 193593374 to 193614710, shown in the middle panel. Bioinformatic analysis identified an exon-like sequence (bottom panel, sequence highlighted in uppercase; GRCh38/hg38: chr3 193603500 to 193603557) flanked by 3′ and 5′ splice sites. Inclusion of this exon leads to the introduction of a premature termination codon rendering the transcript a target of NMD. FIG. 13 discloses SEQ ID NO: 301.

[0044] FIG. 14 depicts confirmation of NMD-inducing exon via puromycin or cycloheximide treatment in various cell lines, as well as the confirmation of NMD-inducing exon in brain and retina samples. RT-PCR analysis using total RNA from water-treated, DMSO-treated, puromycin-treated, or cycloheximide-treated cells confirmed the presence of a band corresponding to the NMD-inducing exon 7x (GRCh38/hg38: chr3 193628509 to 193628616) of OPA1 gene.

[0045] FIG. 15 depicts an exemplary ASO walk around OPA1 exon 7x (GRCh38/hg38: chr3 193628509 193628616) region. A graphic representation of an ASO walk performed for around OPA1 exon 7x (GRCh38/hg38: chr3 193628509 193628616) region targeting sequences upstream of the 3′ splice site, across the 3′splice site, exon 7x, across the 5′ splice site, and downstream of the 5′ splice site is shown. ASOs were designed to cover these regions by shifting 5 nucleotides at a time or 3 nucleotides across the splice site regions. FIG. 15 discloses SEQ ID NOS 302-304, respectively, in order of appearance.

[0046] FIGS. 16A-16C depict data for an OPA1 exon 7x (GRCh38/hg38: chr3 193628509 193628616) region ASO walk evaluated by TaqMan RT-qPCR. Graphs of fold-change of the OPA1 productive mRNA product relative to Sham are plotted. FIG. 16A shows relative Opal mRNA expression relative to the sham control for microwalk starting from IVS6X-86 to IVS6X-1. FIG. 16B shows relative Opal mRNA expression relative to the sham control for microwalk starting from IVS6X/EX7X+3 to EX7X/IVS7X-3. FIG. 16C shows relative Opal mRNA expression relative to the sham control for microwalk starting from IVS7X+1 to IVS7X+86.

[0047] FIG. 17 depicts an OPA1 exon 7x (GRCh38/hg38: chr3 193628509 193628616) region ASO walk evaluated by TaqMan RT-qPCR. Graphs of fold-change of the OPA1 productive mRNA product relative to Sham are plotted.

[0048] FIG. 18 illustrates expression of OPA1 transcripts containing the NMD exon in HEK293 cells treated with increasing amounts of cycloheximide.

[0049] FIG. 19A illustrates RT-PCR data from the posterior segment of the eye of Chlorocebus sabaeus (green monkey) at postnatal data P93 (3 months) and postnatal day P942 (2.6 years). FIG. 19A confirms expression of OPA1 transcripts containing the NMD exon in these cells.

[0050] FIG. 19B illustrates quantification of the NMD exon abundance from FIG. 19A.

[0051] FIG. 20A illustrates RT-PCR of the productive and non-productive OPA1 mRNA after treatment of HEK293 cells with various ASOs and cycloheximide.

[0052] FIG. 20B illustrates quantification of the data in FIG. 20A.

[0053] FIG. 21 illustrates expression of productive OPA1 mRNA by quantitative PCR in HEK293 cells treated with various ASOs and not treated with cycloheximide.

[0054] FIG. 22A illustrates RT-PCR for non-productive OPA1 mRNAs in HEK293 cells after treatment with ASO-14 and cycloheximide.

[0055] FIG. 22B illustrates quantification of productive OPA1 mRNAs in HEK293 cells after treatment with ASO-14 in the absence of cycloheximide.

[0056] FIG. 22C illustrates protein expression of OPA1 in HEK293 cells after treatment with ASO-14 in the absence of cycloheximide.

[0057] FIG. 23A illustrates mRNA and protein levels of OPA1 gene in OPA1 haploinsufficient (OPA1+/−) HEK293 cells.

[0058] FIG. 23B illustrates OPA1 protein expression in the OPA1 haploinsufficient (OPA1+/−) HEK293 cells after treatment with ASO-14.

[0059] FIG. 23C illustrates quantification of OPA1 protein expression in the OPA1 haploinsufficient (OPA1+/−) HEK293 cells after treatment with ASO-14.

[0060] FIG. 24A illustrates study design for the in vivo rabbit experiment of Example 2.14.

[0061] FIG. 24B illustrates levels of productive and non-productive OPA1 mRNA and protein.

[0062] FIG. 24C illustrates quantification of the data from FIG. 24B.

[0063] FIG. 25 illustrates exemplary OPA1 ASOs of this disclosure. The right two columns in the chart illustrate the chemical modifications of the exemplary ASOs. Each nucleotide of all the ASOs has 2′-O-methoxyethyl (2′MOE) modification (“MOE”) unless otherwise noted, for instance, letters of larger font size (e.g., G) are locked nucleic acids (“LNA”), underlined letters (e.g., C) are 5′ methyl-cytosines that have 2′-MOE moiety (“5MeC-MOE”), and some ASOs are noted as phosphorodiamidate morpholino oligomers (“PMO”). FIG. 25 discloses SEQ ID NOS 6-148, 148, 148, 149, 149, 149, 150, 150, 150-151, 151, 151, 123, 152, 152, 152-153, 153, 153-154, 154, 154, 144-146, 93, 81-82, 36, 155, 155-156, 156-157, 157-161, 125, 162, 126, 163-166, 92, 167-179, 156, 180, 157, 159, 181, 160, 182, 161, 183-275, and 305-607 respectively, in order of column.

[0064] FIG. 26A illustrates RT-PCR results for OPA1 mRNAs using probes spanning exon 7 and exon 8 in HEK293 cells after treatment with ASO-14 and cycloheximide.

[0065] FIG. 26B illustrates quantification of OPA1 mRNAs in HEK293 cells after treatment with ASO-14 in the absence of cycloheximide based on qPCR using probes spanning exons 6 and 8, probes spanning exons 7 and 8, or probes spanning exons 23 and 24.

[0066] FIG. 26C illustrates sequencing data on the relative amount of various OPA1 mRNA transcripts in HEK293 cells transfected with ASO-14.

[0067] FIG. 27A illustrates RT-PCR results for OPA1 mRNAs using probes spanning exon 6 and exon 8 in HEK293 cells after treatment with various exemplary OPA1 ASOs.

[0068] FIG. 27B illustrates relative ratio of OPA1 mRNA transcripts having exons 6, 7, and 8 in tandem (“6-7-8”) over the total amount of “6-7-8” transcripts and transcripts having exons 6 and 8 in tandem (“6-8”), in HEK293 cells after treatment with various exemplary OPA1 ASOs.

[0069] FIGS. 27C and 27D illustrate quantification of OPA1 mRNAs using probes spanning exons 6 and 8, and probes spanning exons 7 and 8, respectively, in HEK293 cells after treatment with various exemplary OPA1 ASOs.

[0070] FIG. 28A illustrates RT-PCR results for OPA1 mRNAs using probes spanning exon 6 and exon 8 (“Exon 6-8 PCR”), or probes spanning exon 7x and exon 8 (“Exon 7x-8 PCR”), in HEK293 cells after treatment with various exemplary OPA1 ASOs and treatment with cycloheximide.

[0071] FIG. 28B illustrates expression level of OPA1 protein in HEK293 cells after treatment with various exemplary OPA1 ASOs.

[0072] FIG. 28C illustrates dose response in OPA1 mRNAs using probes spanning exon 6 and exon 8 in HEK293 cells after treatment with various exemplary OPA1 ASOs.

[0073] FIGS. 28D and 28E illustrate quantification of the dose response in OPA1 mRNAs using probes spanning exons 6 and 8, probes spanning exons 7 and 8, probes spanning exons 23 and 24, respectively, in HEK293 cells after treatment with various exemplary OPA1 ASOs. FIG. 28D summarizes the Ct values for the qPCR reactions, and FIG. 28E summarizes the relative amounts.

[0074] FIG. 28F illustrates dose response in expression level of OPA1 protein in HEK293 cells after treatment with various exemplary OPA1 ASOs.

[0075] FIGS. 29A-29D illustrate RT-PCR results for OPA1 mRNAs using probes spanning exon 6 and exon 8 (“Exon 6-8”), or probes spanning exon 7x and exon 8 (“Exon 7-8”), in HEK293 cells after treatment with various exemplary OPA1 ASO 18-mers and treatment with or without cycloheximide.

[0076] FIGS. 30A-30B illustrate RT-PCR results for OPA1 mRNAs using probes spanning exon 6 and exon 8 (“Exon 6-8”), or probes spanning exon 7x and exon 8 (“Exon 7x-8”), in HEK293 cells after treatment with various exemplary OPA1 ASO 18-mers and treatment with or without cycloheximide.

[0077] FIGS. 31A-31D illustrate RT-PCR results for OPA1 mRNAs using probes spanning exon 6 and exon 8 (“Exon 6-8”), or probes spanning exon 7x and exon 8 (“Exon 7-8”), in HEK293 cells after treatment with various exemplary OPA1 ASO 16-mers and treatment with or without cycloheximide.

[0078] FIGS. 32A-32C illustrate RT-PCR results for OPA1 mRNAs using probes spanning exon 6 and exon 8 (“Exon 6-8”), or probes spanning exon 7x and exon 8 (“Exon 7x-8”), in HEK293 cells after treatment with various exemplary OPA1 ASO 15-mers and treatment with or without cycloheximide.

[0079] FIGS. 33A-33B illustrate dose response in OPA1 mRNAs having Exon 6 and Exon 8 (“6-8”), having Exon 7 and Exon 8 (“7-8”), or having Exon 7x and Exon 8 (“7x-8”) in HEK293 cells after treatment with different concentrations of various exemplary OPA1 ASOs.

[0080] FIG. 34A is a histogram that demonstrates ATP level was reduced in mock-treated OPAT+/−HEK293 cells as compared to OPAT+/+HEK293 cells, and ASO-14 treatment of OPAT+/−HEK293 cells increased the ATP level in the cells.

[0081] FIGS. 34B-34C demonstrate the OPA1 protein was increased by ASO-14 in OPAT+/+HEK293 cells. FIG. 34B shows the immunoblot gel images of OPA1 and j-actin proteins, and FIG. 34C is a histogram that summarizes quantification of the immunoblot results.

[0082] FIGS. 35A-35B show histograms that demonstrate mRNA (FIG. 35A) and protein expression (FIG. 35B) of OPA1 gene were reduced in fibroblast cells from diagnosed patients that have haploinsufficient mutation in OPA1 gene as compared to wildtype (WT) fibroblast cells. FIG. 35C shows a representative immunoblot image of OPA protein expression level in diseased fibroblast cells.

[0083] FIGS. 36A, 36B, and 36D show histograms that demonstrate exemplary antisense oligomer, ASO-14, decreased OPA1 NMD exon inclusion (FIG. 36A), increased OPA1 total mRNA level (FIG. 36B), and protein level (FIG. 36D) in wildtype (WT) fibroblast cells and fibroblast cells from diagnosed patients that have haploinsufficient mutation in OPA1 gene. FIG. 36C shows representative immunoblot images of OPA1 protein and loading control β-Tubulin under all types of conditions.

[0084] FIGS. 37A-37E demonstrate that patient fibroblast cells (cell lines F35 and F36) show deficiencies in mitochondrial bioenergetics. FIG. 37A shows representative time courses of the oxygen consumption rate of WT cells, F35 cells, and F36 cells at baseline level and when challenged sequentially with oligomycin, FCCP, rotenone and antimycin A. FIGS. 37B-37E show histograms demonstrating that patient fibroblast cells, F35 and F36 cells had reduced basal oxygen consumption rate (FIG. 37B), ATP-linked respiration (FIG. 37C), maximal respiration (FIG. 37D), and spare respiratory capacity (FIG. 37E), as compared to WT fibroblast cells.

[0085] FIGS. 38A-38D show histograms demonstrating that treatment of ASO-14 at 20 nM, 40 nM, and 60 nM increased basal oxygen consumption rate (FIG. 38A), ATP-linked respiration (FIG. 38B), maximal respiration (FIG. 38C), and spare respiratory capacity (FIG. 38D) of F35 patient cells in a dose-dependent manner.

[0086] FIGS. 39A-39D show histograms demonstrating that treatment of ASO-14 at 20 nM, 40 nM, and 60 nM increased basal oxygen consumption rate (FIG. 39A), ATP-linked respiration (FIG. 39B), maximal respiration (FIG. 39C), and spare respiratory capacity (FIG. 39D) of F36 patient cells in a dose-dependent manner.

[0087] FIG. 40 shows a diagram illustrating 5′ UTR region of a series of various OPA1 mRNA transcripts, with overlaying gray boxes indicating the location of start codons of three upstream open reading frames and the main start codon, which is shown to have the best Kozak sequence surrounding it. FIG. 40 discloses “MWRLRRAAVAC” as SEQ ID NO: 1316.

[0088] FIG. 41 shows a diagram illustrating 5′ UTR region of a series of various OPA1 mRNA transcripts, with (1) overlaying gray boxes indicating the location of start codons of three upstream open reading frames and the main start codon, and (2) blow-up view of the sequences of G-quadruplex motifs that are predicted to be present in the 5′ UTR according to G4IPDB. See Mishra S K, et al. G4IPDB: A database for G-quadruplex structure forming nucleic acid interacting proteins. Sci Rep. 2016 Dec. 1; 6:38144. doi: 10.1038/srep38144. FIG. 41 discloses SEQ ID NOS: 1317-1319 and “MWRLRRAAVAC” as SEQ ID NO: 1316, respectively in order of appearance.

### DETAILED DESCRIPTION

[0089] Agents that modulate transcription of pre-mRNA from a gene, splicing of the pre-mRNA into a mature mRNA (or “processed mRNA”), and/or translation of the mature mRNA can modulate expression of protein that is encoded by the gene. Provided herein, in some aspects, are methods, compositions, and kits relating to an agent that modulates protein expression by modulating mRNA splicing and/or translation. In some aspects, provided herein are methods, compositions, and kits relating to a vector encoding an agent that modulates protein expression by modulating mRNA splicing and/or translation.

[0090] In some aspects, provided herein are methods, compositions, and kits relating to an agent, e.g., a therapeutic agent, that can modulate a translation regulatory element present within a processed mRNA, e.g., by modulating a structure of the translation regulatory element, or modulating interaction of the translation regulatory element with a factor involved in translation of the processed mRNA, and thus can modulate translation of the processed mRNA into a protein encoded by the processed mRNA. In some aspects, provided herein are methods, compositions, and kits relating to an agent, e.g., a therapeutic agent, that can bind to at least a portion of the 5′ untranslated region (“5′ UTR”) of a processed mRNA. In some cases, the agent disclosed herein modulates a translation regulatory element present within the 5′ UTR of the processed mRNA, thereby modulating translation of the processed mRNA and modulating expression of a protein from the processed mRNA. Modulation of one or more translation regulatory element present in a processed mRNA according to some embodiments of the present disclosure can thus modulate expression of a target protein translated from the processed mRNA, which in consequence can provide therapeutic intervention for diseases or conditions that are associated with aberrant level or activity of the target protein.

[0091] In some aspects, provided herein are methods, compositions, and kits relating to an agent, e.g., a therapeutic agent, that can modulate alternative splicing of a pre-mRNA, or a vector encoding the agent. Alternative splicing events in some genes, e.g., OPA1 gene, can lead to non-productive mRNA transcripts which in turn can lead to aberrant protein expression. Agents which can target the alternative splicing events in those genes can modulate the expression level of functional target proteins in patients and/or inhibit aberrant protein expression. Such agents can thus be used to treat a disease or condition that is associated with aberrant level or activity of the target protein.

[0092] One of the alternative splicing events that can lead to non-productive mRNA transcripts is the inclusion of an extra exon in the mRNA transcript that can induce nonsense-mediated mRNA decay. In some aspects, the present disclosure provides compositions, methods, and kits for modulating alternative splicing of a target pre-mRNA, e.g., OPA1 pre-mRNA, to increase the production of protein-coding processed mRNA, and thus, translated functional target protein.

[0093] In some aspects, provided herein are compositions, methods, and kits relating to a combination therapy that utilizes an agent that modulates a translation regulatory element of a processed mRNA that encoding a target protein, e.g., OPA1 protein, and an agent that modulates splicing of a pre-mRNA that is transcribed from a gene that encodes the target protein, e.g., OPA1 gene. In some aspects, provided herein are compositions, methods, and kits relating to a combination therapy that utilizes an agent that target at least a portion of the 5′ UTR of a processed mRNA that encoding a target protein, e.g., OPA1 protein, and an agent that modulates splicing of a pre-mRNA that is transcribed from a gene that encodes the target protein, e.g., OPA1 gene.

### Translation Regulatory

[0094] Without wishing to be bound by a certain theory, eukaryotic mRNAs can be translated by the scanning mechanism, which begins with assembly of a 43S preinitiation complex (PIC), containing methionyl-initiator tRNA (Met-tRNAi) in a ternary complex (TC) with guanosine triphosphate (GTP)-bound eukaryotic initiation factor 2 (eIF2). The 43S PIC assembly is stimulated by eIFs 1, 1A, 3, and 5. Its subsequent attachment to a processed mRNA at the m7G-capped 5′ end is facilitated by the eIF4F complex-composed of cap-binding protein eIF4E, eIF4G, and RNA helicase eIF4A- and by poly(A)-binding protein (PABP). The PIC can scan the mRNA 5′ untranslated region (UTR) for an AUG nucleotide triplet start codon using complementarity with the anticodon of Met-tRNAi. AUG recognition can evoke hydrolysis of the GTP bound to eIF2 to produce a stable 48S PIC. Release of eIF2-GDP is followed by joining of the large (60S) ribosome subunit, catalyzed by eIF5B, to produce an 80S initiation complex ready to begin protein synthesis.

[0095] RNA molecules can fold into intricate shapes that can provide an additional layer of control of gene expression beyond that of their sequence. The 5′ UTR is the region of a processed mRNA that is directly upstream from the main initiation codon. The terms “main initiation codon” or “main start codon,” as used herein, can refer to a start codon that initiate translation of the main open reading frame of a processed mRNA. The term “open reading frame,” as used herein, can refer to a continuous stretch of codons that may begin with a start codon and ends at a stop codon. The “main open reading frame” of a processed mRNA, as used herein, is the open reading frame that encodes the protein that processed mRNA and the gene, from which the processed mRNA is transcribed, are primary responsible for expressing. For instance, the main open reading frame of an OPA1 processed mRNA is the open reading frame on the OPA1 processed mRNA that encodes the OPA1 protein. Similarly, the main open reading frame of an ALB processed mRNA that is transcribed from ALB gene (a gene encoding albumin) is the open reading frame on the ALB processed mRNA that encodes albumin.

[0096] The 5′ UTR region can modulate translation of a processed mRNA by differing mechanisms in viruses, prokaryotes and eukaryotes. In some processed mRNAs, 5′ UTRs can be highly structured and some of the secondary structures or higher order structures formed by the 5′ UTR can block entry of the ribosome. For instance, in some processed mRNAs, there can be one or more secondary structures or higher order structures formed within the 5′ UTR or formed by a portion of the sequence of the 5′ UTR and a sequence at other part of the processed mRNA. In some cases, secondary structures like stem, loop (e.g., hairpin loop), and/or stem-loop can be formed within the 5′ UTR. In some cases, there can be G-quadruplex motif present within the 5′ UTR. As used herein, the term “G-quadruplex” can refer to an RNA structure formed in G-rich regions by the stacking of at least two G-tetrads, each of them forming a square-shaped structure by non-Watson-Crick interactions between two or more layers of paired G-quartets. In some cases, G-quadruplex can be extremely stable, for instance, stable in vitro with melting temperatures that are higher than physiological temperature, especially in the presence of potassium ions (K+), which are specifically chelated inside G-quartets. Description of G-quadruplex can be found in Beaudoin J D & Perreault J P. Nucleic Acids Res. 2010 November; 38(20):7022-36. doi: 10.1093/nar/gkg557, Todd A. K., et al. Nucleic Acids Res. 33, 2901-2907 (2005), Huppert J L & Balasubramanian S. Nucleic Acids Res. 2005 May 24; 33(9):2908-16. doi: 10.1093/nar/gki609, each of which is incorporated herein by reference in its entirety. In some cases, the formation of G-quadruplex can be the most stable RNA structure that could block ribosome scanning. In some cases, G-quadruplex has a sequence according to the formula Gx-N1-7-Gx-N1-7-Gx-N1-7-Gx, where x≥3 and N is A, C, G or U. In some cases, a G-rich sequence that may form a G-quadruplex comprises a sequence GGGAGCCGGGCUGGGGCUCACACGGGGG (SEQ ID NO: 1310). In some cases, some of the sequences or secondary or higher order structures of the 5′ UTR region of a processed mRNA can recruit one or more RNA-binding proteins (RBPs), which can be involved in modulation of the translation of the processed mRNA.

[0097] Upstream open reading frames and upstream start codon can also modulate protein expression by suppressing translation of the processed mRNA encoding the protein. The terms “upstream open reading frame” or “uORF,” as used herein, can refer to an open reading frame located in the 5′ UTR of a processed mRNA, e.g., an open reading frame that is upstream of the main start codon of the processed mRNA. The terms “upstream start codon,” or “upstream initiation codon,” as used herein, can refer to a start codon located in the 5′ UTR of a processed mRNA, e.g., a start codon upstream of the main start codon. An upstream start codon can suppress translation of the processed mRNA that starts from the main start codon. The nature of ribosome scanning during translation of a processed mRNA, its 5′ to 3′ directionality, can dictate that the initiation codon is frequently the AUG triplet closest to the 5′ end, encountered first by the scanning PIC. In some embodiments, some of the first AUG nucleotide triplets can be skipped when it is flanked by an unfavorable sequence—a process termed “leaky scanning”—to use a downstream AUG. A favorable sequence context in mammals is the “Kozak consensus,” 5′ (A/G)CCAUGG 3′. When an upstream start codon (e.g., upstream AUG, or uAUG) is in-frame with a downstream AUG without an intervening stop codon, leaky scanning may occur at some frequency to allow production of two protein isomers differing only by an N-terminal extension, with the longer form often targeted to a particular cellular compartment. If, in some cases, the uAUG is followed by a stop codon in the same open reading frame (ORF), then translation of the upstream ORF (uORF) can attenuate translation of the downstream main ORF (mORF), because re-initiation of the translation is generally inefficient. Some uORFs inhibit downstream translation primarily because ribosomes can stall during their translation and create a roadblock to scanning PICs that bypass the uORF start codon. “Near-cognate” triplets, e.g., NUG (N is any nucleotide) triplets or A(A/G)G triplets, differing from AUG by a single base, can be selected by the scanning PIC but with lower frequencies, owing to the mismatch with the anticodon of tRNAi and attendant destabilization of the 48S PIC. Start codons disclosed herein can include AUG and near-cognate triplets.

[0098] Non-limiting examples of a translation regulatory elements disclosed herein can include a secondary structure of a processed mRNA, e.g., a secondary structure in the 5′ UTR, e.g., a stem, a loop, or a stem-loop, a G-quadruple motif, and an upstream start codon. In some cases, a translation regulatory element of a processed mRNA disclosed herein modulates translation of the processed mRNA by modulating translation efficiency and/or rate of translation of the processed mRNA. In some embodiments, a translation regulatory element disclosed herein inhibits translation of the processed mRNA. For instance, a translation regulatory element can block ribosome scanning during translation, thus suppressing translation efficiency and/or rate of translation. In some cases, an upstream start codon can initiate translation of the upstream open reading frame that is led by it, which prevents the scanning ribosome from re-initiation to translate the main open reading frame, thus suppressing expression of the protein that is encoded by the main open reading frame of the processed mRNA.

Targeting Processed mRNA

[0099] In some embodiments, the methods and compositions of the present disclosure relate to modulation of translation of processed mRNA transcribed from a target gene, e.g., OPA1 gene. In some embodiments, an agent provided herein targets a processed mRNA that encodes a target protein (e.g., OPA1 protein) and comprises a translation regulatory element that inhibits translation of the processed mRNA. In some cases, the agent modulates a structure of the translation regulatory element, thereby increasing expression of the target protein in a cell. In some cases, the agent (a) binds to a targeted portion of the processed mRNA; (b) modulates interaction of the translation regulatory element with a factor involved in translation of the processed mRNA; or (c) a combination of (a) and (b), thereby increasing expression of the target protein (e.g., OPA1 protein) in the cell.

[0100] In some cases, the resulting increase in expression of OPA1 protein induced by the agent that targets a processed mRNA that encodes OPA1 protein can alleviate symptoms of a condition or disease associated with OPA1 deficiency, such as an eye disease or condition, Optic atrophy type 1, autosomal dominant optic atrophy (ADOA), ADOA-plus syndrome; a mitochondrial disorder; glaucoma; normal tension glaucoma; Charcot-Marie-tooth disease; mitochondria dysfunction; diabetic retinopathy; age-related macular degeneration; retinal ganglion cell death; mitochondrial fission-mediated mitochondrial dysfunction; progressive external ophthalmoplegia; deafness; ataxia; motor neuropathy; sensory neuropathy; myopathy; Behr syndrome; brain dysfunction; encephalopathy; peripheral neuropathy; fatal infantile mitochondrial encephalomyopathy; hypertrophic cardiomyopathy; spastic ataxic syndrome; sensory motor peripheral neuropathy; hypotonia; gastrointestinal dysmotility and dysphagia; optic atrophy; optic atrophy plus syndrome; Mitochondrial DNA depletion syndrome 14; late-onset cardiomyopathy; diabetic cardiomyopathy; Alzheimer's Disease; focal segmental glomerulosclerosis; kidney disease; Huntington's Disease; cognitive function decline in healthy aging; Prion diseases; late onset dementia and parkinsonism; mitochondrial myopathy; Leigh syndrome; Friedreich's ataxia; Parkinson's disease; MELAS (Mitochondrial encephalomyopathy, lactic acidosis, and stroke-like episodes); pyruvate dehydrogenase complex deficiency; chronic kidney disease; Leber's hereditary optic neuropathy; obesity; age-related systemic neurodegeneration; skeletal muscle atrophy; heart and brain ischemic damage; massive liver apoptosis; NARP (neuropathy, ataxia, retinitis pigmentosa); MERRF (myoclonic epilepsy and ragged red fibers); Pearsons/Kems-Sayre syndrome; MIDD (maternally inherited diabetes and deafness); mitochondrial trifunctional protein deficiency; Fuchs corneal endothelial dystrophy; macular telangiectasia; retinitis pigmentosa; Leber congenital amaurosis; inherited maculopathy; Stargardt disease; or Sorsby fundus dystrophy.

[0101] In some embodiments, the translation regulatory element is in a 5′ untranslated region (5′ UTR) of the processed mRNA. In some cases, the translation regulatory element comprises at least a portion of a 5′ UTR of the processed mRNA. In some cases, the translation regulatory element comprises a secondary mRNA structure that involves base-pairing with at least one nucleotide of the main start codon of the processed mRNA. In some of these cases, an agent provided herein inhibits the base-pairing with the at least one nucleotide of the main start codon of the processed mRNA. For instance, the agent can unstructured at least one, two, or three of the three nucleotides of the main start codon that tend to be involved in base pairing in a secondary mRNA structure, e.g., a stem, a loop, or a stem-loop. In some embodiments, the mRNA secondary structure comprises a stem, a stem loop, a Guanine quadruplex, or any combination thereof. In some cases, the agent does not bind to the main start codon. For instance, the agent binds to a portion of the processed mRNA that is different from the main start codon, e.g., at least 10, 20, 30, 40, 50, 60, 70, 80, 90, 100, 120, 140, 160, 180, 200, 220, or 230 nucleotides upstream of the main start codon, or at least 10, 20, 30, 40, 50, 60, 70, 80, 90, 100, 120, 140, 160, 180, 200, 250, 300, 400, 500, 600, 800, 1000, or even more nucleotides downstream of the main start codon. In other cases, the agent binds to at least one, two, or three nucleotides of the main start codon. In some cases, the agent inhibits or reduces formation of a secondary mRNA structure comprising the at least one nucleotide of the main start codon of the processed mRNA. For instance, the agent inhibits or reduces base-pairing of the at least one nucleotide of the main start codon of the processed mRNA with another nucleotide of the processed mRNA. In some cases, the another nucleotide is another nucleotide of the 5′ UTR of the processed mRNA.

[0102] In some cases, the target protein is OPA1 protein, and the agent inhibits the base-pairing with the at least one nucleotide of the main start codon of the processed mRNA. In some of these cases, the agent binds to a targeted portion of the processed mRNA that is at most 60 nucleotides upstream of the main start codon of the processed mRNA. In some of these cases, the agent binds to a targeted portion of the processed mRNA that is at least 42 nucleotides upstream of the main start codon of the processed mRNA. In some of these cases, the agent binds to a targeted portion of the processed mRNA that is at most 116 nucleotides upstream of the main start codon of the processed mRNA. In some of these cases, the agent binds to a targeted portion of the processed mRNA that is at least 108 nucleotides upstream of the main start codon of the processed mRNA. In some of these cases, the main start codon of the OPA1 mature mRNA is defined by chromosomal coordinates GRCh38 chr3:193,593,378-193,593,380.

[0103] In some embodiments, the translation regulatory element comprises at least part of an upstream open reading frame (uORF). In some of these cases, an agent provided herein promotes formation of a secondary mRNA structure that involves the at least part of the uORF. In some of these cases, the translation regulatory element comprises an upstream start codon. In some of these cases, the agent promotes formation of a secondary mRNA structure that involves base-pairing with at least one nucleotide of the upstream start codon. In some cases, the agent does not bind to the upstream start codon. In other cases, the agent binds to the upstream start codon. In some of these embodiments, regardless of whether the agent binds to the upstream start codon, the agent promotes or increases formation of a secondary mRNA structure comprising the at least one nucleotide of the upstream start codon. In some cases, the agent promotes or increases base-pairing of the at least one nucleotide of the upstream start codon with another nucleotide of the processed mRNA, optionally the another nucleotide is another nucleotide of the 5′ UTR of the processed mRNA.

[0104] In some embodiments, the target protein is OPA1 protein, and the agent promotes formation of a secondary mRNA structure that involves the at least part of the uORF. In some of these embodiments, the agent binds to a targeted portion of the processed mRNA that is at most 60 nucleotides upstream of the main start codon of the processed mRNA. In some of these embodiments, the agent binds to a targeted portion of the processed mRNA that is at least 52 nucleotides upstream of the main start codon of the processed mRNA. In some of these embodiments, the upstream start codon is defined by genomic coordinates GRCh38 chr3: 193,593,226-193,593,228.

[0105] In some embodiments, the translation regulatory element comprises a Guanine quadruplex formed by a G-rich sequence of the processed mRNA. In some of these embodiments, the agent inhibits formation of the Guanine quadruplex. In some embodiments, the G-rich sequence comprises at least a portion of 5′ untranslated region (5′ UTR) of the processed mRNA. In some embodiments, the G-rich sequence is present in the 5′ untranslated region (5′ UTR) of the processed mRNA. In some embodiments, the G-rich sequence comprises a sequence according to the formula Gx-N1-7-Gx-N1-7-Gx-N1-7-Gx, where x≥3 and N is A, C, G or U. In some embodiments, the G-rich sequence comprises a sequence GGGAGCCGGGCUGGGGCUCACACGGGGG (SEQ ID NO: 1310). In some cases, at least one, two, three or all four of the Gx sequences in the 5′ UTR of the processed mRNA are structured, present in a secondary structure, or base-paired with another nucleotide, optionally the another nucleotide is a C or a U. In some of these embodiments, the agent provided herein relaxes, promotes deformation of, or inhibits or reduces formation of the Guanine quadruplex. In some of these embodiments, the agent relaxes, promotes deformation, or inhibits or reduces base-pairing or a structure of at least one, two, three or all four of the Gx sequences of the Guanine quadruplex.

[0106] In some embodiments, the target protein is OPA1 protein, and the agent inhibits formation of the Guanine quadruplex, and/or relaxes, promotes deformation, or inhibits or reduces base-pairing or a structure of at least one, two, three or all four of the Gx sequences of the Guanine quadruplex. In some of these embodiments, the agent binds to a targeted portion of the processed mRNA that is at most 60 nucleotides upstream of the main start codon of the processed mRNA. In some of these embodiments, the targeted portion of the processed mRNA is at most 35 nucleotides upstream of the main start codon of the processed mRNA. In some of these embodiments, the targeted portion of the processed mRNA is at least 17 nucleotides upstream of the main start codon of the processed mRNA. In some of these embodiments, the targeted portion of the processed mRNA is at most 60 nucleotides upstream of the main start codon of the processed mRNA and at least 17 nucleotides upstream of the main start codon of the processed mRNA.

[0107] In some aspects, an agent provided herein targets a targeted portion within the 5′ UTR of the processed mRNA. In some embodiments, the targeted portion of the processed mRNA comprises at least one nucleotide upstream of the codon immediately downstream from the main start codon of the processed mRNA. In some cases, the targeted portion of the processed mRNA comprises at least one nucleotide that is at most 234 nucleotides upstream of the first nucleotide of the main start codon the processed mRNA. In some cases, the targeted portion of the processed mRNA comprises at least one nucleotide that is at most 234, 220, 200, 180, 160, 140, 120, 100, 80, 90, 70, 60, 50, 40, 30, 20, or 10 nucleotides upstream of the first nucleotide of the main start codon the processed mRNA. In some cases, the targeted portion of the processed mRNA is at least 20, 30, 40, 50, 60, 70, 80, 90, 100, 110, 120, 150, 160, 180, or 200 nucleotides upstream of the main start codon of the processed mRNA. In some cases, the targeted portion of the processed mRNA is about 20, 30, 40, 50, 60, 70, 80, 90, 100, 110, 120, 150, 160, 180, 200, or 220 nucleotides upstream of the main start codon. In some cases, the targeted portion of the processed mRNA is about 110 nucleotides upstream of the main start codon.

[0108] In some embodiments, the target protein is an OPA1 protein, the processed mRNA is a processed mRNA encoding OPA1 protein. In some of these embodiments, the targeted portion of the processed mRNA has a sequence with at least 80%, 82%, 84%, 85%, 86%, 88%, 90%, 91%, 92%, 93%, 94%, 9%, 96%, 97%, 98%, or 99%, or 100% sequence identity to any sequence listed in Table 1.4. In some of these embodiments, the targeted portion of the processed mRNA has a sequence with at least 80%, 82%, 84%, 85%, 86%, 88%, 90%, 91%, 92%, 93%, 94%, 9%, 96%, 97%, 98%, or 99%, or 100% sequence identity to at least 8 contiguous nucleotides of a sequence selected from the group consisting of SEQ ID NOs: 1263-1271. In some cases, the processed mRNA has a sequence with at least 80%, 82%, 84%, 85%, 86%, 88%, 90%, 91%, 92%, 93%, 94%, 9%, 96%, 97%, 98%, or 99%, or 100% sequence identity to any sequence listed in Table 1.3. In some cases, the processed mRNA has a sequence with at least 80%, 82%, 84%, 85%, 86%, 88%, 90%, 91%, 92%, 93%, 94%, 9%, 96%, 97%, 98%, or 99%, or 100% sequence identity to a sequence selected from the group consisting of SEQ ID NOs: 1254-1262. In some cases, the agent comprises an antisense oligomer that has at least 80%, 82%, 84%, 85%, 86%, 88%, 90%, 91%, 92%, 93%, 94%, 9%, 96%, 97%, 98%, or 99%, or 100% sequence identity to any sequence in Table 8. In some cases, the agent comprises an antisense oligomer that has at least 80%, 82%, 84%, 85%, 86%, 88%, 90%, 91%, 92%, 93%, 94%, 9%, 96%, 97%, 98%, or 99%, or 100% sequence identity to any sequence selected from the group consisting of SEQ ID NOs: 608-1253. In some cases, the agent comprises an antisense oligomer that has about 100% sequence identity to a sequence selected from the group consisting of SEQ ID NOs: 608-1253. In some cases, the antisense oligomer has at least 80%, 82%, 84%, 85%, 86%, 88%, 90%, 91%, 92%, 93%, 94%, 9%, 96%, 97%, 98%, or 99%, or 100% sequence identity to a sequence selected from the group consisting of SEQ ID NOs: 827-847, 932-937, 953, 968, 988-1023. In some cases, the antisense oligomer has about 100% sequence identity to a sequence selected from the group consisting of SEQ ID NOs: 827-847, 932-937, 953, 968, 988-1023.

[0109] In some embodiments, one or more of the translation regulatory elements disclosed herein inhibit the translation of the processed mRNA by inhibiting translation efficiency and/or rate of translation of the processed mRNA. In some embodiments, the agent provided herein that targets a processed mRNA increases the expression of the OPA1 protein in the cell by increasing the translation efficiency and/or rate of translation of the processed mRNA.

[0110] In some embodiments, the agent disclosed herein modulates (e.g., promotes or inhibits) binding of factors that regulate translation. Such factors are known in the art, and also described at Patricia R. Araujo et al. Before It Gets Started: Regulating Translation at the 5′ UTR, International Journal of Genomics, vol. 2012, Article ID 475731, 8 pages, 2012, which is incorporated herein by reference in its entirety.

[0111] In some embodiments, the translation efficiency and/or rate of translation of the processed mRNA that encodes the OPA1 protein in the cell contacted with the agent or the vector encoding the agent is increased compared to the translation efficiency and/or rate of translation of the processed mRNA in a control cell not contacted with the agent or the vector encoding the agent.

[0112] In some cases, the translation efficiency and/or rate of translation of the processed mRNA that encodes the OPA1 protein in the cell contacted with the agent disclosed herein or the vector encoding the agent is increased by about 1.1 to about 10-fold, about 1.5 to about 10-fold, about 2 to about 10-fold, about 3 to about 10-fold, about 4 to about 10-fold, about 1.1 to about 5-fold, about 1.1 to about 6-fold, about 1.1 to about 7-fold, about 1.1 to about 8-fold, about 1.1 to about 9-fold, about 2 to about 5-fold, about 2 to about 6-fold, about 2 to about 7-fold, about 2 to about 8-fold, about 2 to about 9-fold, about 3 to about 6-fold, about 3 to about 7-fold, about 3 to about 8-fold, about 3 to about 9-fold, about 4 to about 7-fold, about 4 to about 8-fold, about 4 to about 9-fold, at least about 1.1-fold, at least about 1.5-fold, at least about 2-fold, at least about 2.5-fold, at least about 3-fold, at least about 3.5-fold, at least about 4-fold, at least about 5-fold, or at least about 10-fold, compared to the translation efficiency and/or rate of translation of the processed mRNA in a control cell not contacted with the agent or the vector encoding the agent.

[0113] In some cases, the translation efficiency and/or rate of translation of the processed mRNA that encodes the OPA1 protein in the cell contacted with the agent disclosed herein or the vector encoding the agent is increased by about 1.1 to about 10-fold, about 1.5 to about 10-fold, about 2 to about 10-fold, about 3 to about 10-fold, about 4 to about 10-fold, about 1.1 to about 5-fold, about 1.1 to about 6-fold, about 1.1 to about 7-fold, about 1.1 to about 8-fold, about 1.1 to about 9-fold, about 2 to about 5-fold, about 2 to about 6-fold, about 2 to about 7-fold, about 2 to about 8-fold, about 2 to about 9-fold, about 3 to about 6-fold, about 3 to about 7-fold, about 3 to about 8-fold, about 3 to about 9-fold, about 4 to about 7-fold, about 4 to about 8-fold, about 4 to about 9-fold, at least about 1.1-fold, at least about 1.5-fold, at least about 2-fold, at least about 2.5-fold, at least about 3-fold, at least about 3.5-fold, at least about 4-fold, at least about 5-fold, or at least about 10-fold, compared to in the absence of the agent.

[0114] In some embodiments, the processed mRNA transcript targeted by the disclosed methods, compositions, or kits is a mutant processed mRNA transcript. In some embodiments, the processed mRNA transcript is not a mutant processed mRNA transcript. In some embodiments, the processed mRNA is processed from a pre-mRNA that is a mutant pre-mRNA. In some embodiments, the processed mRNA is processed from a pre-mRNA that is not a mutant pre-mRNA.

mRNA Splicing

[0115] Intervening sequences in RNA sequences or introns are removed by a large and highly dynamic RNA-protein complex termed the spliceosome, which orchestrates complex interactions between primary transcripts, small nuclear RNAs (snRNAs) and a large number of proteins. Spliceosomes assemble ad hoc on each intron in an ordered manner, starting with recognition of the 5′ splice site (5′ss) by U1 snRNA or the 3′splice site (3′ss) by the U2 pathway, which involves binding of the U2 auxiliary factor (U2AF) to the 3′ss region to facilitate U2 binding to the branch point sequence (BPS). U2AF is a stable heterodimer composed of a U2AF2-encoded 65-kD subunit (U2AF65), which binds the polypyrimidine tract (PPT), and a U2AF1-encoded 35-kD subunit (U2AF35), which interacts with highly conserved AG dinucleotides at 3′ss and stabilizes U2AF65 binding. In addition to the BPS/PPT unit and 3′ss/5′ss, accurate splicing requires auxiliary sequences or structures that activate or repress splice site recognition, known as intronic or exonic splicing enhancers or silencers. These elements allow genuine splice sites to be recognized among a vast excess of cryptic or pseudo-sites in the genome of higher eukaryotes, which have the same sequences but outnumber authentic sites by an order of magnitude. Although they often have a regulatory function, the exact mechanisms of their activation or repression are poorly understood.

[0116] The decision of whether to splice or not to splice can be typically modeled as a stochastic rather than deterministic process, such that even the most defined splicing signals can sometimes splice incorrectly. However, under normal conditions, pre-mRNA splicing proceeds at surprisingly high fidelity. This is attributed in part to the activity of adjacent cis-acting auxiliary exonic and intronic splicing regulatory elements (ESRs or ISRs). Typically, these functional elements are classified as either exonic or intronic splicing enhancers (ESEs or ISEs) or silencers (ESSs or ISSs) based on their ability to stimulate or inhibit splicing, respectively. Although there is now evidence that some auxiliary cis-acting elements may act by influencing the kinetics of spliceosome assembly, such as the arrangement of the complex between U1 snRNP and the 5′ss, it seems very likely that many elements function in concert with trans-acting RNA-binding proteins (RBPs). For example, the serine- and arginine-rich family of RBPs (SR proteins) is a conserved family of proteins that have a key role in defining exons. SR proteins promote exon recognition by recruiting components of the pre-spliceosome to adjacent splice sites or by antagonizing the effects of ESSs in the vicinity. The repressive effects of ESSs can be mediated by members of the heterogeneous nuclear ribonucleoprotein (hnRNP) family and can alter recruitment of core splicing factors to adjacent splice sites. In addition to their roles in splicing regulation, silencer elements are suggested to have a role in repression of pseudo-exons, sets of decoy intronic splice sites with the typical spacing of an exon but without a functional open reading frame. ESEs and ESSs, in cooperation with their cognate trans-acting RBPs, represent important components in a set of splicing controls that specify how, where and when mRNAs are assembled from their precursors.

[0117] Alternative splicing is a regulated process during gene expression that can result in multiple isoforms of mature mRNA transcripts that are processed from a single primary mRNA transcript that is transcribed from a single gene, and the resultant multiple proteins that are translated from at least some of the multiple mature mRNA isoforms. In this process, particular exons of a gene may be included within or excluded from the final, processed mRNA produced from that gene. Consequently, the proteins translated from alternatively splices mRNAs will contain differences in their amino acid sequence and, in some cases, in their biological functions.

[0118] As described herein, an “alternatively spliced exon” can refer to an exon of a gene that can be either included or excluded naturally from a mature mRNA transcript, thus resulting in different protein products that are translated from the different mature mRNA transcripts. The inclusion or skipping of an alternatively spliced exon can take place naturally in a cell, either randomly, or in a regulated manner, e.g., subject to regulation by external physiological or pathological stimuli, or intracellular signaling. In some cases, the production of alternatively spliced mRNAs, e.g., the splicing of the alternatively spliced exon, is regulated by a system of trans-acting proteins that bind to cis-acting sites on the primary transcript itself. In some cases, an alternatively spliced exon is a coding exon, e.g., an exon that, when included in the mature mRNA transcript, is translated into an amino acid sequence as part of the protein product translated from the mature mRNA transcript. In some cases, the inclusion of an alternatively spliced exon in the mature mRNA transcript would maintain the canonical open reading frame as compared to a mature mRNA transcript without the alternatively spliced exon, e.g., the number of nucleotides in the alternatively spliced exon is divisible by 3.

[0119] The sequences marking the exon-intron boundaries are degenerate signals of varying strengths that can occur at high frequency within human genes. In multi-exon genes, different pairs of splice sites can be linked together in many different combinations, creating a diverse array of transcripts from a single gene. This is commonly referred to as alternative pre-mRNA splicing. Although most mRNA isoforms produced by alternative splicing can be exported from the nucleus and translated into functional polypeptides, different mRNA isoforms from a single gene can vary greatly in their translation efficiency. Those mRNA isoforms with premature termination codons (PTCs) at least 50 bp upstream of an exon junction complex are likely to be targeted for degradation by the nonsense-mediated mRNA decay (NMD) pathway. Mutations in traditional (BPS/PPT/3′ss/5′ss) and auxiliary splicing motifs can cause aberrant splicing, such as exon skipping or cryptic (or pseudo-) exon inclusion or splice-site activation, and contribute significantly to human morbidity and mortality. Both aberrant and alternative splicing patterns can be influenced by natural DNA variants in exons and introns.

[0120] Given that exon-intron boundaries can occur at any of the three positions of a codon, it is clear that only a subset of alternative splicing events can maintain the canonical open reading frame. For example, only exons that are evenly divisible by 3 can be skipped or included in the mRNA without any alteration of reading frame. Splicing events that do not have compatible phases will induce a frame-shift. Unless reversed by downstream events, frame-shifts can certainly lead to one or more PTCs, probably resulting in subsequent degradation by NMD. NMD is a translation-coupled mechanism that eliminates mRNAs containing PTCs. NMD can function as a surveillance pathway that exists in all eukaryotes. NMD can reduce errors in gene expression by eliminating mRNA transcripts that contain premature stop codons. Translation of these aberrant mRNAs could, in some cases, lead to deleterious gain-of-function or dominant-negative activity of the resulting proteins. NMD targets not only transcripts with PTCs but also a broad array of mRNA isoforms expressed from many endogenous genes, suggesting that NMD is a master regulator that drives both fine and coarse adjustments in steady-state RNA levels in the cell.

[0121] An NMD-inducing exon (“NIE” or “NMD exon”) is an exon or a pseudo-exon that is a region within an intron and can activate the NMD pathway if included in a mature RNA transcript. In constitutive splicing events, the intron containing an NMD exon is usually spliced out, but the intron or a portion thereof (e.g., NMD exon) may be retained during alternative or aberrant splicing events. Mature mRNA transcripts containing such an NMD exon may be non-productive due to frame shifts which induce the NMD pathway. Inclusion of a NMD exon in mature RNA transcripts may downregulate gene expression. mRNA transcripts containing an NMD exon may be referred to as “NIE-containing mRNA” or “NMD exon mRNA” in the current disclosure.

[0122] Cryptic (or pseudo-splice sites) have the same splicing recognition sequences as genuine splice sites but are not used in splicing reactions. They outnumber genuine splice sites in the human genome by an order of a magnitude and are normally repressed by thus far poorly understood molecular mechanisms. Cryptic 5′ splice sites have the consensus NNN/GUNNNN or NNN/GCNNNN where N is any nucleotide and/is the exon-intron boundary. Cryptic 3′ splice sites have the consensus NAG/N. Their activation is positively influenced by surrounding nucleotides that make them more similar to the optimal consensus of authentic splice sites, namely MAG/GURAGU and YAG/G, respectively, where M is C or A, R is G or A, and Y is C or U.

[0123] Splice sites and their regulatory sequences can be readily identified by a skilled person using suitable algorithms publicly available, listed for example in Kralovicova, J. and Vorechovsky, I. (2007) Global control of aberrant splice site activation by auxiliary splicing sequences: evidence for a gradient in exon and intron definition. Nucleic Acids Res., 35, 6399-6413 (www.ncbi.nlm.nih.gov/pmc/articles/PMC2095810/pdf/gkm680.pdf).

[0124] The cryptic splice sites or splicing regulatory sequences may compete for RNA-binding proteins, such as U2AF, with a splice site of the NMD exon. In some embodiments, an agent may bind to a cryptic splice site or splicing regulatory sequence to prevent binding of RNA-binding proteins and thereby favor binding of RNA-binding proteins to the NMD exon splice sites.

[0125] In some embodiments, the cryptic splice site may not comprise the 5′ or 3′ splice site of the NMD exon. In some embodiments, the cryptic splice site may be at least 10 nucleotides, at least 20 nucleotides, at least 50 nucleotides, at least 100 nucleotides or at least 200 nucleotides upstream of the NMD exon 5′ splice site. In some embodiments, the cryptic splice site may be at least 10 nucleotides, at least 20 nucleotides, at least 50 nucleotides, at least 100 nucleotides, at least 200 nucleotides downstream of the NMD exon 3′ splice site.

### Target Transcripts

[0126] In some embodiments, the methods and compositions of the present disclosure exploit the presence of NMD exon in the pre-mRNA transcribed from the OPA1 gene. Splicing of the identified OPA1 NMD exon pre-mRNA species to produce functional mature OPA1 mRNA may be induced using an agent such as an ASO that stimulates exon skipping of an NMD exon. Induction of exon skipping may result in inhibition of an NMD pathway. The resulting mature OPA1 mRNA can be translated normally without activating NMD pathway, thereby increasing the amount of OPA1 protein in the patient's cells and alleviating symptoms of a condition or disease associated with OPA1 deficiency, such as an eye disease or condition, Optic atrophy type 1, autosomal dominant optic atrophy (ADOA), ADOA-plus syndrome; a mitochondrial disorder; glaucoma; normal tension glaucoma; Charcot-Marie-Tooth disease; mitochondria dysfunction; diabetic retinopathy; age-related macular degeneration; retinal ganglion cell death; mitochondrial fission-mediated mitochondrial dysfunction; progressive external ophthalmoplegia; deafness; ataxia; motor neuropathy; sensory neuropathy; myopathy; Behr syndrome; brain dysfunction; encephalopathy; peripheral neuropathy; fatal infantile mitochondrial encephalomyopathy; hypertrophic cardiomyopathy; spastic ataxic syndrome; sensory motor peripheral neuropathy; hypotonia; gastrointestinal dysmotility and dysphagia; optic atrophy; optic atrophy plus syndrome; Mitochondrial DNA depletion syndrome 14; late-onset cardiomyopathy; diabetic cardiomyopathy; Alzheimer's Disease; focal segmental glomerulosclerosis; kidney disease; Huntington's Disease; cognitive function decline in healthy aging; Prion diseases; late onset dementia and parkinsonism; mitochondrial myopathy; Leigh syndrome; Friedreich's ataxia; Parkinson's disease; MELAS (Mitochondrial encephalomyopathy, lactic acidosis, and stroke-like episodes); pyruvate dehydrogenase complex deficiency; chronic kidney disease; Leber's hereditary optic neuropathy; obesity; age-related systemic neurodegeneration; skeletal muscle atrophy; heart and brain ischemic damage; massive liver apoptosis; NARP (neuropathy, ataxia, retinitis pigmentosa); MERRF (myoclonic epilepsy and ragged red fibers); Pearsons/Kerns-Sayre syndrome; MIDD (maternally inherited diabetes and deafness); mitochondrial trifunctional protein deficiency; Fuchs corneal endothelial dystrophy; macular telangiectasia; retinitis pigmentosa; Leber congenital amaurosis; inherited maculopathy; Stargardt disease; or Sorsby fundus dystrophy.

[0127] In some embodiments, the methods and compositions of the present disclosure exploit the alternative splicing of the pre-mRNA transcribed from the OPA1 gene. In some cases, splicing of a coding exon, e.g., an alternatively spliced exon, e.g., OPA1 exon 7 (or an exon encoded by genomic region spanning from GRCh38/hg38: chr3 193626092 to 193626202), can modulate the level of OPA1 protein expressed from the OPA1 gene. As described herein, the term “OPA1 exon 7” or grammatically equivalents thereof, is used interchangeably with the term “exon (GRCh38/hg38: chr3 193626092 to 193626202)” or “an exon encoded by genomic region spanning from GRCh38/hg38: chr3 193626092 to 193626202.” Without wishing to be bound by a certain theory, the presence or absence of an amino acid sequence encoded by exon 7 or exon (GRCh38/hg38: chr3 193626092 to 193626202) can modulate the stability of the OPA1 protein. For instance, in some cases, the OPA1 protein encoded by a mature mRNA transcript that lacks exon 7 can have fewer proteolytic cleavage sites as compared to an OPA1 protein encoded by a corresponding mature mRNA transcript that has contains exon 7. In some cases, the OPA1 protein an OPA1 protein encoded by a corresponding mature mRNA transcript that has contains encoded by a mature mRNA transcript that lacks exon 7 is a functional protein. The OPA1 protein encoded by a mature mRNA transcript that lacks exon 7 can be at least partially functional as compared to an OPA1 protein encoded by a corresponding mature mRNA transcript that has contains exon 7. In some cases, the OPA1 protein encoded by a mature mRNA transcript that lacks exon 7 is at least partially functional as compared to a full-length wild-type OPA1 protein. In some cases, increase of OPA1 protein encoded by a mature mRNA transcript that lacks exon 7 in a cell can result in more functional OPA1 protein in the cell, due to the higher stability of the OPA1 protein lacking exon 7 and its at least partial functional equivalence.

[0128] In other embodiments, a coding exon of OPA1 pre-mRNA other than exon 7 is targeted by an agent disclosed herein, which promotes exclusion of the coding exon other than exon 7. In these other embodiments, the agent that promotes exclusion of the coding exon other than exon 7 increases expression of OPA1 protein encoded by a mature mRNA transcript that lacks the excluded exon.

[0129] Alternative splicing of the OPA1 pre-mRNA species, e.g., skipping of a coding exon, e.g., an alternatively spliced exon, e.g., exon 7, to produce functional mature OPA1 protein may be induced using an agent such as an ASO that stimulates the exon skipping. Induction of exon skipping may result in modulation of levels of different alternatively spliced mRNA transcripts. The resulting mature OPA1 mRNA can be translated into different OPA1 proteins, thereby modulating the amount of OPA1 protein in the patient's cells and alleviating symptoms of a condition or disease associated with OPA1 deficiency, such as an eye disease or condition, Optic atrophy type 1, autosomal dominant optic atrophy (ADOA), ADOA-plus syndrome; a mitochondrial disorder; glaucoma; normal tension glaucoma; Charcot-Marie-tooth disease; mitochondria dysfunction; diabetic retinopathy; age-related macular degeneration; retinal ganglion cell death; mitochondrial fission-mediated mitochondrial dysfunction; progressive external ophthalmoplegia; deafness; ataxia; motor neuropathy; sensory neuropathy; myopathy; Behr syndrome; brain dysfunction; encephalopathy; peripheral neuropathy; fatal infantile mitochondrial encephalomyopathy; hypertrophic cardiomyopathy; spastic ataxic syndrome; sensory motor peripheral neuropathy; hypotonia; gastrointestinal dysmotility and dysphagia; optic atrophy; optic atrophy plus syndrome; Mitochondrial DNA depletion syndrome 14; late-onset cardiomyopathy; diabetic cardiomyopathy; Alzheimer's Disease; focal segmental glomerulosclerosis; kidney disease; Huntington's Disease; cognitive function decline in healthy aging; Prion diseases; late onset dementia and parkinsonism; mitochondrial myopathy; Leigh syndrome; Friedreich's ataxia; Parkinson's disease; MELAS (Mitochondrial encephalomyopathy, lactic acidosis, and stroke-like episodes); pyruvate dehydrogenase complex deficiency; chronic kidney disease; Leber's hereditary optic neuropathy; obesity; age-related systemic neurodegeneration; skeletal muscle atrophy; heart and brain ischemic damage; massive liver apoptosis; NARP (neuropathy, ataxia, retinitis pigmentosa); MERRF (myoclonic epilepsy and ragged red fibers); Pearsons/Kems-Sayre syndrome; MIDD (maternally inherited diabetes and deafness); mitochondrial trifunctional protein deficiency; Fuchs corneal endothelial dystrophy; macular telangiectasia; retinitis pigmentosa; Leber congenital amaurosis; inherited maculopathy; Stargardt disease; or Sorsby fundus dystrophy.

[0130] In some embodiments, the diseases or conditions that can be treated or ameliorated using the method or composition disclosed herein are not directly associated with the target protein (gene) that the therapeutic agent targets. In some embodiments, a therapeutic agent provided herein can target a protein (gene) that is not directly associated with a disease or condition, but the modulation of expression of the target protein (gene) can treat or ameliorate the disease or condition.

[0131] In various embodiments, the present disclosure provides a therapeutic agent which can target OPA1 mRNA transcripts to modulate splicing or protein expression level. The therapeutic agent can be a small molecule, polynucleotide, or polypeptide. In some embodiments, the therapeutic agent is an ASO. Various regions or sequences on the OPA1 pre-mRNA can be targeted by a therapeutic agent, such as an ASO. In some embodiments, the ASO targets an OPA1 pre-mRNA transcript containing an NMD exon. In some embodiments, the ASO targets a sequence within an NMD exon of an OPA1 pre-mRNA transcript. In some embodiments, the ASO targets a sequence upstream (or 5′) from the 5′ end of an NMD exon (3′ss) of an OPA1 pre-mRNA transcript. In some embodiments, the ASO targets a sequence downstream (or 3′) from the 3′ end of an NMD exon (5′ss) of an OPA1 pre-mRNA transcript. In some embodiments, the ASO targets a sequence that is within an intron flanking on the 5′ end of the NMD exon of an OPA1 pre-mRNA transcript. In some embodiments, the ASO targets a sequence that is within an intron flanking the 3′ end of the NMD exon of an OPA1 pre-mRNA transcript. In some embodiments, the ASO targets a sequence comprising an NMD exon-intron boundary of an OPA1 pre-mRNA transcript. An NMD exon-intron boundary can refer to the junction of an intron sequence and an NMD exon region. The intron sequence can flank the 5′ end of the NMD exon, or the 3′ end of the NMD exon. In some embodiments, the ASO targets a sequence within an exon of an OPA1 pre-mRNA transcript. In some embodiments, the ASO targets a sequence within an intron of an OPA1 pre-mRNA transcript. In some embodiments, the ASO targets a sequence comprising both a portion of an intron and a portion of an exon of an OPA1 pre-mRNA transcript.

[0132] In some embodiments, the ASO targets a sequence about 4 to about 300 nucleotides upstream (or 5′) from the 5′ end of the NMD exon. In some embodiments, the ASO targets a sequence about 1 to about 20 nucleotides, about 20 to about 50 nucleotides, about 50 to about 100 nucleotides, about 100 to about 150 nucleotides, about 150 to about 200 nucleotides, about 200 to about 250 nucleotides, or about 250 to about 300 nucleotides upstream (or 5′) from the 5′ end of the NMD exon region. In some embodiments, the ASO may target a sequence more than 300 nucleotides upstream from the 5′ end of the NMD exon. In some embodiments, the ASO targets a sequence about 4 to about 300 nucleotides downstream (or 3′) from the 3′ end of the NMD exon. In some embodiments, the ASO targets a sequence about 1 to about 20 nucleotides, about 20 to about 50 nucleotides, about 50 to about 100 nucleotides, about 100 to about 150 nucleotides, about 150 to about 200 nucleotides, about 200 to about 250 nucleotides, or about 250 to about 300 nucleotides downstream from the 3′ end of the NMD exon. In some embodiments, the ASO targets a sequence more than 300 nucleotides downstream from the 3′ end of the NMD exon.

[0133] In some embodiments, the OPA1 NMD exon-containing pre-mRNA transcript is encoded by a genetic sequence with at least about 80%, 85%, 90%, 95%, 96%, 97%, 98%, 99% or 100% sequence identity to SEQ ID NO. 1. In some embodiments, the OPA1 NMD exon pre-mRNA transcript comprises a sequence with at least about 80%, 85%, 90%, 95%, 96%, 97%, 98%, 99% or 100% sequence identity to any one of SEQ ID NOs: 2-5.

[0134] In some embodiments, the OPA1 NMD exon-containing pre-mRNA transcript (or NMD exon mRNA) comprises a sequence with at least about 80%, 85%, 90%, 95%, 97%, or 100% sequence identity to any one of SEQ ID NOs: 2-5. In some embodiments, OPA1 NMD exon-containing pre-mRNA transcript (or NMD exon mRNA) is encoded by a sequence with at least about 80%, 85%, 90%, 95%, 97%, or 100% sequence identity to any one of SEQ ID NOs: 2-5. In some embodiments, the targeted portion of the NMD exon mRNA comprises a sequence with at least 80%, 85%, 90%, 95%, 97%, or 100% sequence identity to a region comprising at least 8 contiguous nucleic acids of any one of SEQ ID NOs: 2-5.

[0135] In some embodiments, the ASO targets exon 6x of an OPA1 NMD exon-containing pre-mRNA comprising NIE exon 6, exon 7x of an OPA1 NMD exon-containing pre-mRNA comprising NIE exon 7, or exon 28x of an OPA1 NMD exon-containing pre-mRNA comprising NIE exon 28. In some embodiments, the ASO targets exon (GRCh38/hg38: chr3 193628509 193628616) of OPA1 pre-mRNA; or exon (GRCh38/hg38: chr3 193603500 193603557) of OPA1. In some embodiments, the ASO targets an NMD exon of OPA1 pre-mRNA other than NMD exon (GRCh38/hg38: chr3 193628509 193628616).

[0136] In some embodiments, the ASO targets a sequence about 1500 nucleotides, about 1000 nucleotides, about 800 nucleotides, about 700 nucleotides, about 600 nucleotides, about 500 nucleotides, about 400 nucleotides, about 300 nucleotides, about 200 nucleotides, about 100 nucleotides, about 80 nucleotides, about 70 nucleotides, about 60 nucleotides, about 50 nucleotides upstream (or 5′) from the 5′ end of exon 6x of OPA1, exon 7x of OPA1, or exon 28x of OPA1. In some embodiments, the ASO targets a sequence about 1500 nucleotides, about 1000 nucleotides, about 800 nucleotides, about 700 nucleotides, about 600 nucleotides, about 500 nucleotides, about 400 nucleotides, about 300 nucleotides, about 200 nucleotides, about 100 nucleotides, about 80 nucleotides, about 70 nucleotides, about 60 nucleotides, about 50 nucleotides upstream (or 5′) from GRCh38/hg38: chr3 193628509 of OPA1; or GRCh38/hg38: chr3 193603500 of OPA1.

[0137] In some embodiments, the ASO targets a sequence at most about 1500 nucleotides, about 1000 nucleotides, about 800 nucleotides, about 700 nucleotides, about 600 nucleotides, about 500 nucleotides, about 400 nucleotides, about 300 nucleotides, about 200 nucleotides, about 100 nucleotides, about 80 nucleotides, about 70 nucleotides, about 60 nucleotides, about 50 nucleotides upstream (or 5′) from the 5′ end of exon 6x of OPA1, exon 7x of OPA1, or exon 28x of OPA1. In some embodiments, the ASO targets a sequence at most about 1500 nucleotides, about 1000 nucleotides, about 800 nucleotides, about 700 nucleotides, about 600 nucleotides, about 500 nucleotides, about 400 nucleotides, about 300 nucleotides, about 200 nucleotides, about 100 nucleotides, about 80 nucleotides, about 70 nucleotides, about 60 nucleotides, about 50 nucleotides upstream (or 5′) from GRCh38/hg38: chr3 193628509 of OPA1; or GRCh38/hg38: chr3 193603500 of OPA1.

[0138] In some embodiments, the ASO targets a sequence about 1500 nucleotides, about 1000 nucleotides, about 800 nucleotides, about 700 nucleotides, about 600 nucleotides, about 500 nucleotides, about 400 nucleotides, about 300 nucleotides, about 200 nucleotides, about 100 nucleotides, about 80 nucleotides, about 70 nucleotides, about 60 nucleotides, about 50 nucleotides downstream (or 3′) from the 3′ end of exon 6x of OPA1, exon 7x of OPA1, or exon 28x of OPAL. In some embodiments, the ASO targets a sequence about 1500 nucleotides, about 1000 nucleotides, about 800 nucleotides, about 700 nucleotides, about 600 nucleotides, about 500 nucleotides, about 400 nucleotides, about 300 nucleotides, about 200 nucleotides, about 100 nucleotides, about 80 nucleotides, about 70 nucleotides, about 60 nucleotides, about 50 nucleotides downstream (or 3′) from GRCh38/hg38: chr3 193628616 of OPA1; or GRCh38/hg38: chr3 193603557 of OPAL.

[0139] In some embodiments, the ASO targets a sequence at most about 1500 nucleotides, about 1000 nucleotides, about 800 nucleotides, about 700 nucleotides, about 600 nucleotides, about 500 nucleotides, about 400 nucleotides, about 300 nucleotides, about 200 nucleotides, about 100 nucleotides, about 80 nucleotides, about 70 nucleotides, about 60 nucleotides, about 50 nucleotides downstream (or 3′) from the 3′ end of exon 6x of OPA1, exon 7x of OPA1, or exon 28x of OPAL. In some embodiments, the ASO targets a sequence at most about 1500 nucleotides, about 1000 nucleotides, about 800 nucleotides, about 700 nucleotides, about 600 nucleotides, about 500 nucleotides, about 400 nucleotides, about 300 nucleotides, about 200 nucleotides, about 100 nucleotides, about 80 nucleotides, about 70 nucleotides, about 60 nucleotides, about 50 nucleotides downstream (or 3′) from GRCh38/hg38: chr3 193628616 of OPA1; or GRCh38/hg38: chr3 193603557 of OPAL.

[0140] In some embodiments, the ASO has a sequence complementary to the targeted portion of the NMD exon mRNA according to any one of SEQ ID NOs: 2-5, or 279.

[0141] In some embodiments, the ASO targets a sequence upstream from the 5′ end of an NMD exon. For example, ASOs targeting a sequence upstream from the 5′ end of an NMD exon (exon 6x of OPA1, exon 7x of OPA1, or exon 28x of OPA1) comprises a sequence that is at least about 80%, 85%, 90%, 95%, 97%, or 100% complimentary to at least 8 contiguous nucleic acids of SEQ ID NO: 2 or 3. For example, ASOs targeting a sequence upstream from the 5′ end of an NMD exon (e.g., exon (GRCh38/hg38: chr3 193628509 to 193628616) of OPA1; or exon (GRCh38/hg38: chr3 193603500 193603557) of OPA1) can comprise a sequence with at least 80%, 85%, 90%, 95%, 97%, or 100% sequence identity to SEQ ID NO: 4 or 5.

[0142] In some embodiments, the ASOs target a sequence containing an exon-intron boundary (or junction). For example, ASOs targeting a sequence containing an exon-intron boundary can comprise a sequence that is at least about 80%, 85%, 90%, 95%, 97%, or 100% complimentary to at least 8 contiguous nucleic acids of any one of SEQ ID NOs: 2-5. In some embodiments, the ASOs target a sequence downstream from the 3′ end of an NMD exon. For example, ASOs targeting a sequence downstream from the 3′ end of an NMD exon (e.g., exon 6x of OPA1, exon 7x of OPA1, or exon 28x of OPA1) can comprise a sequence with at least 80%, 85%, 90%, 95%, 97%, or 100% sequence identity to SEQ ID NO: 2 or 3, or at least 8 contiguous nucleic acids of SEQ ID NO: 2 or 3. For example, ASOs targeting a sequence downstream from the 3′ end of an NMD exon (e.g., exon (GRCh38/hg38: chr3 193628509 to 193628616) of OPA1; or exon (GRCh38/hg38: chr3 193603500 to 193603557) of OPA1) can comprise a sequence with at least 80%, 85%, 90%, 95%, 97%, or 100% sequence identity to SEQ ID NO: 4 or 5, or at least 8 contiguous nucleic acids of SEQ ID NO: 4 or 5. In some embodiments, ASOs target a sequence within an NMD exon.

[0143] In some embodiments, the ASO targets exon 6x of an OPA1 NMD exon-containing pre-mRNA comprising NIE exon 6, exon 7x of an OPA1 NMD exon-containing pre-mRNA comprising NIE exon 7, or exon 28x of an OPA1 NMD exon-containing pre-mRNA comprising NIE exon 28. In some embodiments, the ASO targets a sequence downstream (or 3′) from the 5′ end of exon 6x, exon 7x, or exon 28x of an OPA1 pre-mRNA. In some embodiments, the ASO targets a sequence upstream (or 5′) from the 3′ end of exon 6x, exon 7x, or exon 28x of an OPA1 pre-mRNA.

[0144] In some embodiments, the targeted portion of the OPA1 NMD exon-containing pre-mRNA is in intron 1, 2, 3, 4, 5, 6, 7, 8, 9, 10, 11, 12, 13, 14, 15, 16, 17, 18, 19, 20, 21, 22, 23, 24, 25, 26, 27, 28, 29, 30, 31, 32, 33, 34, 35, 36, 37, 38, 39, 40, 41, 42, 43, 44, 45, 46, 47, 48, 49, or 50. In some embodiments, hybridization of an ASO to the targeted portion of the NMD exon pre-mRNA results in exon skipping of at least one of NMD exon within intron 1, 2, 3, 4, 5, 6, 7, 8, 9, 10, 11, 12, 13, 14, 15, 16, 17, 18, 19, 20, 21, 22, 23, 24, 25, 26, 27, 28, 29, 30, 31, 32, 33, 34, 35, 36, 37, 38, 39, 40, 41, 42, 43, 44, 45, 46, 47, 48, 49, or 50, and subsequently increases OPA1 protein production. In some embodiments, the targeted portion of the OPA1 NMD exon-containing pre-mRNA is in intron 6 of OPA1, or intron 28 of OPAL. In some embodiments, the targeted portion of the OPA1 NMD exon-containing pre-mRNA is intron (GRCh38/hg38: chr3 193626203 to 193631611) of OPA1; or intron (GRCh38/hg38: chr3 193593374 to 193614710) of OPAL.

[0145] In some embodiments, the methods and compositions of the present disclosure are used to increase the expression of OPA1 by inducing exon skipping of a pseudo-exon of an OPA1 NMD exon-containing pre-mRNA. In some embodiments, the pseudo-exon is a sequence within any of introns 1-50. In some embodiments, the pseudo-exon is a sequence within any of introns 1, 2, 3, 4, 5, 6, 7, 8, 9, 10, 11, 12, 13, 14, 15, 16, 17, 18, 19, 20, 21, 22, 23, 24, 25, 26, 27, 28, 29, 30, 31, 32, 33, 34, 35, 36, 37, 38, 39, 40, 41, 42, 43, 44, 45, 46, 47, 48, 49, or 50. In some embodiments, the pseudo-exon can be an OPA1 intron or a portion thereof. In some embodiments, the pseudo-exon is within intron 6 of OPA1, or intron 28 of OPAL. In some embodiments, the pseudo-exon is within intron (GRCh38/hg38: chr3 193626203 to 193631611) of OPA1; or intron (GRCh38/hg38: chr3 193593374 to 193614710) of OPA1.

[0146] In some embodiments, the ASO targets an OPA1 pre-mRNA transcript to induce exon skipping of a coding exon, e.g., an alternatively spliced exon. In some embodiments, the ASO targets a sequence within a coding exon, e.g., an alternatively spliced exon, of an OPA1 pre-mRNA transcript. In some embodiments, the ASO targets a sequence upstream (or 5′) from the 5′ end of a coding exon (3′ss) of an OPA1 pre-mRNA transcript. In some embodiments, the ASO targets a sequence downstream (or 3′) from the 3′ end of a coding exon (5′ss) of an OPA1 pre-mRNA transcript. In some embodiments, the ASO targets a sequence that is within an intron flanking on the 5′ end of the coding exon of an OPA1 pre-mRNA transcript. In some embodiments, the ASO targets a sequence that is within an intron flanking the 3′ end of the coding exon of an OPA1 pre-mRNA transcript. In some embodiments, the ASO targets a sequence comprising an exon-intron boundary of an OPA1 pre-mRNA transcript. An exon-intron boundary can refer to the junction of an intron sequence and an exon sequence. The intron sequence can flank the 5′ end of the coding exon, or the 3′ end of the coding exon. In some embodiments, the ASO targets a sequence within an exon of an OPA1 pre-mRNA transcript. In some embodiments, the ASO targets a sequence within an intron of an OPA1 pre-mRNA transcript. In some embodiments, the ASO targets a sequence comprising both a portion of an intron and a portion of an exon of an OPA1 pre-mRNA transcript.

[0147] In some embodiments, the ASO targets a sequence about 4 to about 300 nucleotides upstream (or 5′) from the 5′ end of the coding exon, e.g., alternatively spliced exon. In some embodiments, the ASO targets a sequence about 1 to about 20 nucleotides, about 20 to about 50 nucleotides, about 50 to about 100 nucleotides, about 100 to about 150 nucleotides, about 150 to about 200 nucleotides, about 200 to about 250 nucleotides, or about 250 to about 300 nucleotides upstream (or 5′) from the 5′ end of the coding exon region. In some embodiments, the ASO may target a sequence more than 300 nucleotides upstream from the 5′ end of the coding exon. In some embodiments, the ASO targets a sequence about 4 to about 300 nucleotides downstream (or 3′) from the 3′ end of the coding exon. In some embodiments, the ASO targets a sequence about 1 to about 20 nucleotides, about 20 to about 50 nucleotides, about 50 to about 100 nucleotides, about 100 to about 150 nucleotides, about 150 to about 200 nucleotides, about 200 to about 250 nucleotides, or about 250 to about 300 nucleotides downstream from the 3′ end of the coding exon. In some embodiments, the ASO targets a sequence more than 300 nucleotides downstream from the 3′ end of the coding exon.

[0148] In some embodiments, the OPA1 pre-mRNA transcript is encoded by a genetic sequence with at least about 80%, 85%, 90%, 95%, 96%, 97%, 98%, 99% or 100% sequence identity to SEQ ID NO. 1. In some embodiments, the OPA1 pre-mRNA transcript comprises a sequence with at least about 80%, 85%, 90%, 95%, 96%, 97%, 98%, 99% or 100% sequence identity to any one of SEQ ID NOs: 2-5.

[0149] In some embodiments, the OPA1 pre-mRNA transcript (or NMD exon mRNA) comprises a sequence with at least about 80%, 85%, 90%, 95%, 97%, or 100% sequence identity to any one of SEQ ID NOs: 2-5. In some embodiments, OPA1 pre-mRNA transcript (or NMD exon mRNA) is encoded by a sequence with at least about 80%, 85%, 90%, 95%, 97%, or 100% sequence identity to any one of SEQ ID NOs: 2-5. In some embodiments, the targeted portion of the OPA1 pre-mRNA comprises a sequence with at least 80%, 85%, 90%, 95%, 97%, or 100% sequence identity to a region comprising at least 8 contiguous nucleic acids of any one of SEQ ID NOs: 2-5.

[0150] In some embodiments, the ASO targets exon 7 of an OPA1 pre-mRNA, i.e., the ASO targets exon (GRCh38/hg38: chr3 193626092 to 193626202) of OPA1 pre-mRNA.

[0151] In some embodiments, the ASO targets a coding exon of an OPA1 pre-mRNA other than exon 7, i.e., the ASO targets an exon of OPA1 pre-mRNA other than exon defined by (GRCh38/hg38: chr3 193626092 to 193626202).

[0152] In some embodiments, the ASO targets a sequence about 1500 nucleotides, about 1000 nucleotides, about 800 nucleotides, about 700 nucleotides, about 600 nucleotides, about 500 nucleotides, about 400 nucleotides, about 300 nucleotides, about 200 nucleotides, about 100 nucleotides, about 80 nucleotides, about 70 nucleotides, about 60 nucleotides, about 50 nucleotides upstream (or 5′) from the 5′ end of exon 7 of OPA1. In some embodiments, the ASO targets a sequence about 1500 nucleotides, about 1000 nucleotides, about 800 nucleotides, about 700 nucleotides, about 600 nucleotides, about 500 nucleotides, about 400 nucleotides, about 300 nucleotides, about 200 nucleotides, about 100 nucleotides, about 80 nucleotides, about 70 nucleotides, about 60 nucleotides, about 50 nucleotides upstream (or 5′) from GRCh38/hg38: chr3 193626092 of OPA1.

[0153] In some embodiments, the ASO targets a sequence at most about 1500 nucleotides, about 1000 nucleotides, about 800 nucleotides, about 700 nucleotides, about 600 nucleotides, about 500 nucleotides, about 400 nucleotides, about 300 nucleotides, about 200 nucleotides, about 100 nucleotides, about 80 nucleotides, about 70 nucleotides, about 60 nucleotides, about 50 nucleotides upstream (or 5′) from the 5′ end of exon 7 of OPA1. In some embodiments, the ASO targets a sequence at most about 1500 nucleotides, about 1000 nucleotides, about 800 nucleotides, about 700 nucleotides, about 600 nucleotides, about 500 nucleotides, about 400 nucleotides, about 300 nucleotides, about 200 nucleotides, about 100 nucleotides, about 80 nucleotides, about 70 nucleotides, about 60 nucleotides, about 50 nucleotides upstream (or 5′) from GRCh38/hg38: 193626092 of OPA1.

[0154] In some embodiments, the ASO targets a sequence about 1500 nucleotides, about 1000 nucleotides, about 800 nucleotides, about 700 nucleotides, about 600 nucleotides, about 500 nucleotides, about 400 nucleotides, about 300 nucleotides, about 200 nucleotides, about 100 nucleotides, about 80 nucleotides, about 70 nucleotides, about 60 nucleotides, about 50 nucleotides downstream (or 3′) from the 3′ end of exon 7 of OPA1. In some embodiments, the ASO targets a sequence about 1500 nucleotides, about 1000 nucleotides, about 800 nucleotides, about 700 nucleotides, about 600 nucleotides, about 500 nucleotides, about 400 nucleotides, about 300 nucleotides, about 200 nucleotides, about 100 nucleotides, about 80 nucleotides, about 70 nucleotides, about 60 nucleotides, about 50 nucleotides downstream (or 3′) from GRCh38/hg38: chr3 193626202 of OPA1.

[0155] In some embodiments, the ASO targets a sequence at most about 1500 nucleotides, about 1000 nucleotides, about 800 nucleotides, about 700 nucleotides, about 600 nucleotides, about 500 nucleotides, about 400 nucleotides, about 300 nucleotides, about 200 nucleotides, about 100 nucleotides, about 80 nucleotides, about 70 nucleotides, about 60 nucleotides, about 50 nucleotides downstream (or 3′) from the 3′ end of exon 7 of OPA1. In some embodiments, the ASO targets a sequence at most about 1500 nucleotides, about 1000 nucleotides, about 800 nucleotides, about 700 nucleotides, about 600 nucleotides, about 500 nucleotides, about 400 nucleotides, about 300 nucleotides, about 200 nucleotides, about 100 nucleotides, about 80 nucleotides, about 70 nucleotides, about 60 nucleotides, about 50 nucleotides downstream (or 3′) from GRCh38/hg38: chr3 193626202 of OPA1.

[0156] In some embodiments, the ASO has a sequence complementary to the targeted portion of the NMD exon mRNA according to any one of SEQ ID NOs: 2-5, or 277.

[0157] In some embodiments, the ASO targets a sequence upstream from the 5′ end of a coding exon, e.g., an alternatively spliced exon. For example, ASOs targeting a sequence upstream from the 5′ end of a coding exon (e.g., exon 7 of OPA1) comprises a sequence that is at least about 80%, 85%, 90%, 95%, 97%, or 100% complimentary to at least 8 contiguous nucleic acids of SEQ ID NO: 2 or 3. For example, ASOs targeting a sequence upstream from the 5′ end of a coding exon (e.g., exon (GRCh38/hg38: 193626092 to 193626202) of OPA1) can comprise a sequence with at least 80%, 85%, 90%, 95%, 97%, or 100% sequence identity to SEQ ID NO: 4 or 5.

[0158] In some embodiments, the ASOs target a sequence containing an exon-intron boundary (or junction). For example, ASOs targeting a sequence containing an exon-intron boundary can comprise a sequence that is at least about 80%, 85%, 90%, 95%, 97%, or 100% complimentary to at least 8 contiguous nucleic acids of any one of SEQ ID NOs: 2-5. In some embodiments, the ASOs target a sequence downstream from the 3′ end of a coding exon, e.g., an alternatively spliced exon. For example, ASOs targeting a sequence downstream from the 3′ end of a coding exon (e.g., exon 7 of OPA1) can comprise a sequence with at least 80%, 85%, 90%, 95%, 97%, or 100% sequence identity to SEQ ID NO: 2 or 3, or at least 8 contiguous nucleic acids of SEQ ID NO: 2 or 3. For example, ASOs targeting a sequence downstream from the 3′ end of a coding exon (e.g., exon 7 of OPA1) can comprise a sequence with at least 80%, 85%, 90%, 95%, 97%, or 100% sequence identity to SEQ ID NO: 4 or 5, or at least 8 contiguous nucleic acids of SEQ ID NO: 4 or 5. In some embodiments, ASOs target a sequence within a coding exon, e.g., an alternatively spliced exon.

### Exon Inclusion

[0159] As used herein, a “NMD exon-containing pre-mRNA” is a pre-mRNA transcript that contains at least one pseudo-exon. Alternative or aberrant splicing can result in inclusion of the at least one pseudo-exon in the mature mRNA transcripts. The terms “mature mRNA,” “processed mRNA,” and “fully-spliced mRNA,” are used interchangeably herein to describe a fully processed mRNA that has completed splicing events in a cell. Inclusion of the at least one pseudo-exon can be non-productive mRNA and lead to NMD of the mature mRNA. NMD exon-containing mature mRNA may sometimes lead to aberrant protein expression.

[0160] In some embodiments, the included pseudo-exon is the most abundant pseudo-exon in a population of NMD exon-containing pre-mRNAs transcribed from the gene encoding the target protein in a cell. In some embodiments, the included pseudo-exon is the most abundant pseudo-exon in a population of NMD exon-containing pre-mRNAs transcribed from the gene encoding the target protein in a cell, wherein the population of NMD exon-containing pre-mRNAs comprises two or more included pseudo-exons. In some embodiments, an antisense oligomer targeted to the most abundant pseudo-exon in the population of NMD exon-containing pre-mRNAs encoding the target protein induces exon skipping of one or two or more pseudo-exons in the population, including the pseudo-exon to which the antisense oligomer is targeted or binds. In some embodiments, the targeted region is in a pseudo-exon that is the most abundant pseudo-exon in a NMD exon-containing pre-mRNA encoding the OPA1 protein.

[0161] The degree of exon inclusion can be expressed as percent exon inclusion, e.g., the percentage of transcripts in which a given pseudo-exon is included. In brief, percent exon inclusion can be calculated as the percentage of the amount of RNA transcripts with the exon inclusion, over the sum of the average of the amount of RNA transcripts with exon inclusion plus the average of the amount of RNA transcripts with exon exclusion.

[0162] In some embodiments, an included pseudo-exon is an exon that is identified as an included pseudo-exon based on a determination of at least about 5%, at least about 10%, at least about 15%, at least about 20%, at least about 25%, at least about 30%, at least about 35%, at least about 40%, at least about 45%, or at least about 50%, inclusion. In embodiments, a included pseudo-exon is an exon that is identified as a included pseudo-exon based on a determination of about 5% to about 100%, about 5% to about 95%, about 5% to about 90%, about 5% to about 85%, about 5% to about 80%, about 5% to about 75%, about 5% to about 70%, about 5% to about 65%, about 5% to about 60%, about 5% to about 55%, about 5% to about 50%, about 5% to about 45%, about 5% to about 40%, about 5% to about 35%, about 5% to about 30%, about 5% to about 25%, about 5% to about 20%, about 5% to about 15%, about 10% to about 100%, about 10% to about 95%, about 10% to about 90%, about 10% to about 85%, about 10% to about 80%, about 10% to about 75%, about 10% to about 70%, about 10% to about 65%, about 10% to about 60%, about 10% to about 55%, about 10% to about 50%, about 10% to about 45%, about 10% to about 40%, about 10% to about 35%, about 10% to about 30%, about 10% to about 25%, about 10% to about 20%, about 15% to about 100%, about 15% to about 95%, about 15% to about 90%, about 15% to about 85%, about 15% to about 80%, about 15% to about 75%, about 15% to about 70%, about 15% to about 65%, about 15% to about 60%, about 15% to about 55%, about 15% to about 50%, about 15% to about 45%, about 15% to about 40%, about 15% to about 35%, about 15% to about 30%, about 15% to about 25%, about 20% to about 100%, about 20% to about 95%, about 20% to about 90%, about 20% to about 85%, about 20% to about 80%, about 20% to about 75%, about 20% to about 70%, about 20% to about 65%, about 20% to about 60%, about 20% to about 55%, about 20% to about 50%, about 20% to about 45%, about 20% to about 40%, about 20% to about 35%, about 20% to about 30%, about 25% to about 100%, about 25% to about 95%, about 25% to about 90%, about 25% to about 85%, about 25% to about 80%, about 25% to about 75%, about 25% to about 70%, about 25% to about 65%, about 25% to about 60%, about 25% to about 55%, about 25% to about 50%, about 25% to about 45%, about 25% to about 40%, or about 25% to about 35%, inclusion. ENCODE data (described by, e.g., Tilgner, et al., 2012, “Deep sequencing of subcellular RNA fractions shows splicing to be predominantly co-transcriptional in the human genome but inefficient for lncRNAs,” Genome Research 22(9):1616-25) can be used to aid in identifying exon inclusion.

[0163] In some embodiments, contacting cells with an ASO that is complementary to a targeted portion of an OPA1 pre-mRNA transcript results in an increase in the amount of OPA1 protein produced by at least 10, 20, 30, 40, 50, 60, 80, 100, 150, 200, 250, 300, 350, 400, 450, 500, or 1000%, compared to the amount of the protein produced by a cell in the absence of the ASO/absence of treatment. In some embodiments, the total amount of OPA1 protein produced by the cell to which the antisense oligomer is contacted is increased about 20% to about 300%, about 50% to about 300%, about 100% to about 300%, about 150% to about 300%, about 20% to about 50%, about 20% to about 100%, about 20% to about 150%, about 20% to about 200%, about 20% to about 250%, about 50% to about 100%, about 50% to about 150%, about 50% to about 200%, about 50% to about 250%, about 100% to about 150%, about 100% to about 200%, about 100% to about 250%, about 150% to about 200%, about 150% to about 250%, about 200% to about 250%, at least about 10%, at least about 20%, at least about 50%, at least about 100%, at least about 150%, at least about 200%, at least about 250%, or at least about 300%, compared to the amount of target protein produced by a control compound. In some embodiments, the total amount of OPA1 protein produced by the cell to which the antisense oligomer is contacted is increased about 1.1 to about 10-fold, about 1.5 to about 10-fold, about 2 to about 10-fold, about 3 to about 10-fold, about 4 to about 10-fold, about 1.1 to about 5-fold, about 1.1 to about 6-fold, about 1.1 to about 7-fold, about 1.1 to about 8-fold, about 1.1 to about 9-fold, about 2 to about 5-fold, about 2 to about 6-fold, about 2 to about 7-fold, about 2 to about 8-fold, about 2 to about 9-fold, about 3 to about 6-fold, about 3 to about 7-fold, about 3 to about 8-fold, about 3 to about 9-fold, about 4 to about 7-fold, about 4 to about 8-fold, about 4 to about 9-fold, at least about 1.1-fold, at least about 1.5-fold, at least about 2-fold, at least about 2.5-fold, at least about 3-fold, at least about 3.5-fold, at least about 4-fold, at least about 5-fold, or at least about 10-fold, compared to the amount of target protein produced by a control compound. A control compound can be, for example, an oligonucleotide that is not complementary to a targeted portion of the pre-mRNA.

[0164] In some embodiments, contacting cells with an ASO that is complementary to a targeted portion of an OPA1 pre-mRNA transcript results in an increase in the amount of mRNA encoding OPA1, including the mature mRNA encoding the target protein. In some embodiments, the amount of mRNA encoding OPA1 protein, or the mature mRNA encoding the OPA1 protein, is increased by at least 10, 20, 30, 40, 50, 60, 80, 100, 150, 200, 250, 300, 350, 400, 450, 500, or 1000%, compared to the amount of the protein produced by a cell in the absence of the ASO/absence of treatment. In some embodiments, the total amount of the mRNA encoding OPA1 protein, or the mature mRNA encoding OPA1 protein produced in the cell to which the antisense oligomer is contacted is increased about 20% to about 300%, about 50% to about 300%, about 100% to about 300%, about 150% to about 300%, about 20% to about 50%, about 20% to about 100%, about 20% to about 150%, about 20% to about 200%, about 20% to about 250%, about 50% to about 100%, about 50% to about 150%, about 50% to about 200%, about 50% to about 250%, about 100% to about 150%, about 100% to about 200%, about 100% to about 250%, about 150% to about 200%, about 150% to about 250%, about 200% to about 250%, at least about 10%, at least about 20%, at least about 50%, at least about 100%, at least about 150%, at least about 200%, at least about 250%, or at least about 300%, compared to the amount of mature RNA produced in an untreated cell, e.g., an untreated cell or a cell treated with a control compound. In some embodiments, the total amount of the mRNA encoding OPA1 protein, or the mature mRNA encoding OPA1 protein produced in the cell to which the antisense oligomer is contacted is increased about 1.1 to about 10-fold, about 1.5 to about 10-fold, about 2 to about 10-fold, about 3 to about 10-fold, about 4 to about 10-fold, about 1.1 to about 5-fold, about 1.1 to about 6-fold, about 1.1 to about 7-fold, about 1.1 to about 8-fold, about 1.1 to about 9-fold, about 2 to about 5-fold, about 2 to about 6-fold, about 2 to about 7-fold, about 2 to about 8-fold, about 2 to about 9-fold, about 3 to about 6-fold, about 3 to about 7-fold, about 3 to about 8-fold, about 3 to about 9-fold, about 4 to about 7-fold, about 4 to about 8-fold, about 4 to about 9-fold, at least about 1.1-fold, at least about 1.5-fold, at least about 2-fold, at least about 2.5-fold, at least about 3-fold, at least about 3.5-fold, at least about 4-fold, at least about 5-fold, or at least about 10-fold compared to the amount of mature RNA produced in an untreated cell, e.g., an untreated cell or a cell treated with a control compound. A control compound can be, for example, an oligonucleotide that is not complementary to a targeted portion of the OPA1 NMD exon-containing pre-mRNA.

[0165] The NMD exon can be in any length. In some embodiments, the NMD exon comprises a full sequence of an intron, in which case, it can be referred to as intron retention. In some embodiments, the NMD exon can be a portion of the intron. In some embodiments, the NMD exon can be a 5′ end portion of an intron including a 5′ss sequence. In some embodiments, the NMD exon can be a 3′ end portion of an intron including a 3′ss sequence. In some embodiments, the NMD exon can be a portion within an intron without inclusion of a 5′ss sequence. In some embodiments, the NMD exon can be a portion within an intron without inclusion of a 3′ss sequence. In some embodiments, the NMD exon can be a portion within an intron without inclusion of either a 5′ss or a 3′ss sequence. In some embodiments, the NMD exon can be from 5 nucleotides to 10 nucleotides in length, from 10 nucleotides to 15 nucleotides in length, from 15 nucleotides to 20 nucleotides in length, from 20 nucleotides to 25 nucleotides in length, from 25 nucleotides to 30 nucleotides in length, from 30 nucleotides to 35 nucleotides in length, from 35 nucleotides to 40 nucleotides in length, from 40 nucleotides to 45 nucleotides in length, from 45 nucleotides to 50 nucleotides in length, from 50 nucleotides to 55 nucleotides in length, from 55 nucleotides to 60 nucleotides in length, from 60 nucleotides to 65 nucleotides in length, from 65 nucleotides to 70 nucleotides in length, from 70 nucleotides to 75 nucleotides in length, from 75 nucleotides to 80 nucleotides in length, from 80 nucleotides to 85 nucleotides in length, from 85 nucleotides to 90 nucleotides in length, from 90 nucleotides to 95 nucleotides in length, or from 95 nucleotides to 100 nucleotides in length. In some embodiments, the NMD exon can be at least 10 nucleotides, at least 20 nucleotides, at least 30 nucleotides, at least 40 nucleotides, at least 50 nucleotides, at least 60 nucleoids, at least 70 nucleotides, at least 80 nucleotides in length, at least 90 nucleotides, or at least 100 nucleotides in length. In some embodiments, the NMD exon can be from 100 to 200 nucleotides in length, from 200 to 300 nucleotides in length, from 300 to 400 nucleotides in length, from 400 to 500 nucleotides in length, from 500 to 600 nucleotides in length, from 600 to 700 nucleotides in length, from 700 to 800 nucleotides in length, from 800 to 900 nucleotides in length, from 900 to 1,000 nucleotides in length. In some embodiments, the NMD exon may be longer than 1,000 nucleotides in length.

[0166] Inclusion of a pseudo-exon can lead to a frameshift and the introduction of a premature termination codon (PIC) in the mature mRNA transcript rendering the transcript a target of NMD. Mature mRNA transcript containing NMD exon can be non-productive mRNA transcript which does not lead to protein expression. The PIC can be present in any position downstream of an NMD exon. In some embodiments, the PIC can be present in any exon downstream of an NMD exon. In some embodiments, the PIC can be present within the NMD exon. For example, inclusion of exon 6x of OPA1, exon 7x of OPA1, or exon 28x of OPA1, in an mRNA transcript encoded by the OPA1 gene can induce a PIC in the mRNA transcript. For example, inclusion of exon (GRCh38/hg38: chr3 193628509 193628616) of OPA1; or exon (GRCh38/hg38: chr3 193603500 193603557) of OPA1 in an mRNA transcript encoded by the OPA1.

[0167] In some aspects, provided herein is a method of modulating expression of an OPA1 protein by promoting inclusion of a coding exon. The method can comprise contacting an agent to a cell having an OPA1 pre-mRNA, wherein the agent comprises an oligonucleotide that binds to: (a) a targeted portion of the pre-mRNA within an intronic region immediately upstream of a 5′ end of the coding exon of the pre-mRNA; or (b) a targeted portion of the pre-mRNA within an intronic region immediately downstream of a 3′ end of the coding exon of the pre-mRNA; whereby the agent increases a level of a processed mRNA that is processed from the pre-mRNA and that contains the coding exon in the cell. In some cases, the coding exon to be included is an alternatively spliced exon. In some cases, the method promotes inclusion of the coding exon in the processed mRNA during splicing of the pre-mRNA in the cell.

[0168] In some of these embodiments for inclusion of coding exon, the target portion of the pre-mRNA is within a region spanning from 100 to 50, from 100 to 60, from 100 to 70, from 100 to 80, or from 100 to 90 nucleotides upstream of a 5′ end of the coding exon. In some cases, the target portion of the pre-mRNA is within a region spanning from 40 to 100, from 50 to 100, from 60 to 100, from 70 to 100, from 80 to 100, or from 90 to 100 nucleotides downstream of a 3′ end of the coding exon. In some cases, the coding exon is exon 7 of OPAL. In some cases, the coding exon comprises a sequence with at least 80%, at least 90%, or 100% sequence identity to SEQ ID NO: 277. In some cases, the coding exon comprises SEQ ID NO: 277. The targeted portion of the pre-mRNA can be within a region spanning from 100 to 50, from 100 to 60, from 100 to 70, from 100 to 80, or from 100 to 90 nucleotides upstream of genomic site GRCh38/hg38: chr3 193626092. In some cases, the targeted portion of the pre-mRNA is within a region spanning from 40 to 100, from 50 to 100, from 60 to 100, from 70 to 100, from 80 to 100, or from 90 to 100 nucleotides downstream of genomic site GRCh38/hg38: chr3 193626202.

[0169] In some cases, the inclusion of the coding exon in the processed mRNA in the cell contacted with the agent is increased by about 1.1 to about 10-fold, about 1.5 to about 10-fold, about 2 to about 10-fold, about 3 to about 10-fold, about 4 to about 10-fold, about 1.1 to about 5-fold, about 1.1 to about 6-fold, about 1.1 to about 7-fold, about 1.1 to about 8-fold, about 1.1 to about 9-fold, about 2 to about 5-fold, about 2 to about 6-fold, about 2 to about 7-fold, about 2 to about 8-fold, about 2 to about 9-fold, about 3 to about 6-fold, about 3 to about 7-fold, about 3 to about 8-fold, about 3 to about 9-fold, about 4 to about 7-fold, about 4 to about 8-fold, about 4 to about 9-fold, at least about 1.1-fold, at least about 1.5-fold, at least about 2-fold, at least about 2.5-fold, at least about 3-fold, at least about 3.5-fold, at least about 4-fold, at least about 5-fold, or at least about 10-fold, compared to in the absence of the agent.

### Exclusion of Both NMD Exon and Coding Exon

[0170] In some embodiments, provided herein is a method of modulating expression of a target protein by targeting a pre-mRNA and modulating exclusion of both a coding exon and a nonsense-mediated RNA decay-inducing exon (NMD exon) from the pre-mRNA. In some cases, the method comprises contacting an agent to the cell, and the agent promotes exclusion of both the coding exon and the NMD exon from the pre-mRNA, thereby increasing level of a processed mRNA that is processed from the pre-mRNA and lacks both the coding exon and the NMD exon. In some cases, the agent binds to a targeted portion of the pre-mRNA, or modulates binding of a factor involved in splicing of the coding exon, the NMD exon, or both. In some cases, the agent interferes with binding of the factor involved in splicing of the coding exon, the NMD exon, or both, to a region of the targeted portion. In some cases, the NMD exon is within an intronic region adjacent to the coding exon. In some cases, the NMD exon is within an intronic region immediately upstream of the coding exon. In some cases, the NMD exon is within an intronic region immediately downstream of the coding exon. In some cases, the coding exon is an alternatively spliced exon.

[0171] In some cases, the targeted portion of the pre-mRNA is proximal to the coding exon. The targeted portion of the pre-mRNA can be located in an intronic region immediately upstream of the coding exon. The targeted portion of the pre-mRNA can be located in an intronic region immediately downstream of the coding exon. In some cases, the targeted portion of the pre-mRNA can be located within the coding exon. In some cases, the targeted portion of the pre-mRNA is within a region spanning from 49 to 1, from 39 to 1, from 29 to 1, or from 19 to 1 nucleotides upstream of 5′ end of the coding exon. In some cases, the targeted portion of the pre-mRNA is within a region spanning from 100 nucleotides upstream of the coding exon to 100 nucleotides downstream of the coding exon. In some cases, the targeted portion comprises about 1, 2, 3, 4, 5, 6, 7, 8, 9, 10, 11, 12, 13, 14, 15, 16, 17, 18, 19, 20, 21, 22, 23, 24, 25, 26, 27, 28, 29, 30, or more consecutive nucleotides of the coding exon.

[0172] In some cases, the targeted portion of the pre-mRNA is proximal to the NMD exon. In some cases, the targeted portion of the pre-mRNA is located in an intronic region immediately upstream of the NMD exon. In some cases, the targeted portion of the pre-mRNA is located in an intronic region immediately downstream of the NMD exon. In some cases, the targeted portion of the pre-mRNA is located within the NMD exon. In some cases, the targeted portion of the pre-mRNA is within a region spanning from 100 nucleotides upstream of the NMD exon to 100 nucleotides downstream of the NMD exon.

[0173] In some embodiments, the method described herein is applicable to modulation of expression of OPA1 protein by modulating exclusion of both exon 7 and an NMD exon (e.g., exon 7x) of OPA1 pre-mRNA that contains both exon 7 and exon 7x. In some cases, the coding exon comprises a sequence with at least 80%, at least 90%, or 100% sequence identity to SEQ ID NO: 277. In some cases, the coding exon comprises SEQ ID NO: 277. In some cases, the targeted portion of the pre-mRNA is immediately upstream of the coding exon GRCh38/hg38: chr3 193626092 to 193626202. In some cases, the targeted portion of the pre-mRNA is immediately downstream of the coding exon GRCh38/hg38: chr3 193626092 to 193626202. In some cases, the targeted portion of the pre-mRNA is within a region spanning from 49 to 1, from 39 to 1, from 29 to 1, or from 19 to 1 nucleotides upstream of GRCh38/hg38: chr3 193626092. In some cases, the targeted portion of the pre-mRNA is within a region spanning from 100 nucleotides upstream of genomic site GRCh38/hg38: chr3 193626092 to 100 nucleotides downstream of genomic site GRCh38/hg38: chr3 193626202. In some cases, the targeted portion of the pre-mRNA is within the coding exon GRCh38/hg38: chr3 193626092 to 193626202. In some cases, the targeted portion of the pre-mRNA comprises an exon-intron junction of the coding exon GRCh38/hg38: chr3 193626092 to 193626202. In some cases, the NMD exon comprises a sequence with at least 80%, at least 90%, or 100% sequence identity to SEQ ID NO: 279. In some cases, the NMD exon comprises SEQ ID NO: 279. In some cases, the targeted portion of the pre-mRNA is immediately upstream of the NMD exon GRCh38/hg38: chr3 193628509 to 193628616. In some cases, the targeted portion of the pre-mRNA is immediately downstream of the NMD exon GRCh38/hg38: chr3 193628509 to 193628616. In some cases, the targeted portion of the pre-mRNA is within a region spanning from 100 nucleotides upstream of genomic site GRCh38/hg38: chr3 193628509 to 100 nucleotides downstream of genomic site GRCh38/hg38: chr3 193628616.

[0174] In some cases, the targeted portion of the pre-mRNA is within the NMD exon GRCh38/hg38: chr3 193628509 to 193628616. In some cases, the targeted portion of the pre-mRNA comprises an exon-intron junction of the NMD exon GRCh38/hg38: chr3 193628509 to 193628616. In some cases, the targeted portion comprises about 1, 2, 3, 4, 5, 6, 7, 8, 9, 10, 11, 12, 13, 14, 15, 16, 17, 18, 19, 20, 21, 22, 23, 24, 25, 26, 27, 28, 29, 30, or more consecutive nucleotides of the NMD exon.

[0175] In some cases, the exclusion of the coding exon from the pre-mRNA in the cell contacted with the agent is increased by about 1.1 to about 10-fold, about 1.5 to about 10-fold, about 2 to about 10-fold, about 3 to about 10-fold, about 4 to about 10-fold, about 1.1 to about 5-fold, about 1.1 to about 6-fold, about 1.1 to about 7-fold, about 1.1 to about 8-fold, about 1.1 to about 9-fold, about 2 to about 5-fold, about 2 to about 6-fold, about 2 to about 7-fold, about 2 to about 8-fold, about 2 to about 9-fold, about 3 to about 6-fold, about 3 to about 7-fold, about 3 to about 8-fold, about 3 to about 9-fold, about 4 to about 7-fold, about 4 to about 8-fold, about 4 to about 9-fold, at least about 1.1-fold, at least about 1.5-fold, at least about 2-fold, at least about 2.5-fold, at least about 3-fold, at least about 3.5-fold, at least about 4-fold, at least about 5-fold, or at least about 10-fold, compared to in the absence of contacting with the agent. In some cases, the exclusion of the NMD exon from the pre-mRNA in the cell contacted with the agent is increased by about 1.1 to about 10-fold, about 1.5 to about 10-fold, about 2 to about 10-fold, about 3 to about 10-fold, about 4 to about 10-fold, about 1.1 to about 5-fold, about 1.1 to about 6-fold, about 1.1 to about 7-fold, about 1.1 to about 8-fold, about 1.1 to about 9-fold, about 2 to about 5-fold, about 2 to about 6-fold, about 2 to about 7-fold, about 2 to about 8-fold, about 2 to about 9-fold, about 3 to about 6-fold, about 3 to about 7-fold, about 3 to about 8-fold, about 3 to about 9-fold, about 4 to about 7-fold, about 4 to about 8-fold, about 4 to about 9-fold, at least about 1.1-fold, at least about 1.5-fold, at least about 2-fold, at least about 2.5-fold, at least about 3-fold, at least about 3.5-fold, at least about 4-fold, at least about 5-fold, or at least about 10-fold, compared to in the absence of contacting with the agent. In some cases, the method results in an increase in the level of the processed mRNA in the cell. The level of the processed mRNA in the cell contacted with the agent can be increased by about 1.1 to about 10-fold, about 1.5 to about 10-fold, about 2 to about 10-fold, about 3 to about 10-fold, about 4 to about 10-fold, about 1.1 to about 5-fold, about 1.1 to about 6-fold, about 1.1 to about 7-fold, about 1.1 to about 8-fold, about 1.1 to about 9-fold, about 2 to about 5-fold, about 2 to about 6-fold, about 2 to about 7-fold, about 2 to about 8-fold, about 2 to about 9-fold, about 3 to about 6-fold, about 3 to about 7-fold, about 3 to about 8-fold, about 3 to about 9-fold, about 4 to about 7-fold, about 4 to about 8-fold, about 4 to about 9-fold, at least about 1.1-fold, at least about 1.5-fold, at least about 2-fold, at least about 2.5-fold, at least about 3-fold, at least about 3.5-fold, at least about 4-fold, at least about 5-fold, or at least about 10-fold, compared to in the absence of contacting with the agent.

[0176] In some cases, the method results in an increase in expression of the OPA1 protein in the cell. A level of the OPA1 protein expressed from the processed mRNA in the cell contacted with the agent can be increased by about 1.1 to about 10-fold, about 1.5 to about 10-fold, about 2 to about 10-fold, about 3 to about 10-fold, about 4 to about 10-fold, about 1.1 to about 5-fold, about 1.1 to about 6-fold, about 1.1 to about 7-fold, about 1.1 to about 8-fold, about 1.1 to about 9-fold, about 2 to about 5-fold, about 2 to about 6-fold, about 2 to about 7-fold, about 2 to about 8-fold, about 2 to about 9-fold, about 3 to about 6-fold, about 3 to about 7-fold, about 3 to about 8-fold, about 3 to about 9-fold, about 4 to about 7-fold, about 4 to about 8-fold, about 4 to about 9-fold, at least about 1.1-fold, at least about 1.5-fold, at least about 2-fold, at least about 2.5-fold, at least about 3-fold, at least about 3.5-fold, at least about 4-fold, at least about 5-fold, or at least about 10-fold, compared to in the absence of contacting with the agent.

[0177] In some cases, a level of the OPA1 protein expressed from the processed mRNA in the cell contacted with the agent is increased by at least about 1.5-fold compared to in the absence of contacting with the agent.

[0178] In some cases, the OPA1 protein expressed from the processed mRNA that lacks exon 7 and exon 7x is a functional OPA1 protein. The OPA1 protein expressed from the processed mRNA that lacks exon 7 and exon 7x can be at least partially functional as compared to a wild-type OPA1 protein. The OPA1 protein expressed from the processed mRNA that lacks exon 7 and exon 7x can be at least partially functional as compared to a full-length wild-type OPA1 protein.

### Protein Expression

[0179] In some embodiments, the methods described herein are used to increase the production of a functional target protein, e.g., OPA1 protein. As used herein, the term “functional” refers to the amount of activity or function of a target protein, e.g., OPA1 protein, that is necessary to eliminate any one or more symptoms of a treated condition or disease, e.g., Optic atrophy type 1. In some embodiments, the methods are used to increase the production of a partially functional target protein, e.g., OPA1 protein. As used herein, the term “partially functional” refers to any amount of activity or function of the target protein, e.g., OPA1 protein, that is less than the amount of activity or function that is necessary to eliminate or prevent any one or more symptoms of a disease or condition. In some embodiments, a partially functional protein or RNA will have at least 10%, at least 20%, at least 30%, at least 40%, at least 50%, at least 60%, at least 70%, at least 75%, at least 80%, at least 85%, at least 90%, or at least 95% less activity relative to the fully functional protein or RNA.

[0180] In some embodiments, the method is a method of increasing the expression of a target protein, protein by cells of a subject having a target gene that encodes the target protein, wherein the subject has a disease or condition caused by a deficient amount of activity of the target protein, and wherein the deficient amount of the target protein is caused by haploinsufficiency of the target protein. In such an embodiment, the subject has a first allele encoding a functional target protein, and a second allele from which the target protein is not produced. In another such embodiment, the subject has a first allele encoding a functional target protein, and a second allele encoding a nonfunctional target protein. In another such embodiment, the subject has a first allele encoding a functional target protein, and a second allele encoding a partially functional target protein. In any of these embodiments, the agent binds to a targeted portion of the target pre-mRNA transcribed from the second allele, thereby inducing exon skipping of the pseudo-exon from the pre-mRNA, and causing an increase in the level of mature mRNA encoding functional target protein, and an increase in the expression of the target protein in the cells of the subject. Alternatively, or additionally, the agent can bind to a targeted portion of the target processed mRNA that encodes the target protein, thereby increasing translation of the target processed mRNA and increasing expression of the target protein.

[0181] In some embodiments, the method is a method of increasing the expression of the OPA1, protein by cells of a subject having an OPA1 gene, wherein the subject has a disease or condition, e.g., Optic atrophy type 1, caused by a deficient amount of activity of OPA1 protein, and wherein the deficient amount of the OPA1 protein is caused by haploinsufficiency of the OPA1 protein. In such an embodiment, the subject has a first allele encoding a functional OPA1 protein, and a second allele from which the OPA1 protein is not produced. In another such embodiment, the subject has a first allele encoding a functional OPA1 protein, and a second allele encoding a nonfunctional OPA1 protein. In another such embodiment, the subject has a first allele encoding a functional OPA1 protein, and a second allele encoding a partially functional OPA1 protein. In any of these embodiments, the antisense oligomer binds to a targeted portion of the OPA1 pre-mRNA transcribed from the second allele, thereby inducing exon skipping of the pseudo-exon from the pre-mRNA, and causing an increase in the level of mature mRNA encoding functional OPA1 protein, and an increase in the expression of the OPA1 protein in the cells of the subject. Alternatively, or additionally, the agent can bind to a targeted portion of the OPA1 processed mRNA that encodes the OPA1 protein, thereby increasing translation of the OPA1 processed mRNA and increasing expression of the OPA1 protein.

[0182] In some embodiments, the method is a method of increasing the expression of the target protein by cells of a subject, wherein the subject has a disease or condition caused by a deficient amount of activity of target protein, and wherein the deficient amount of the target protein is caused by autosomal recessive inheritance.

[0183] In some embodiments, the method is a method of increasing the expression of the OPA1 protein by cells of a subject, wherein the subject has a disease or condition caused by a deficient amount of activity of OPA1 protein, and wherein the deficient amount of the OPA1 protein is caused by autosomal recessive inheritance.

[0184] In some embodiments, the method is a method of increasing the expression of the target protein by cells of a subject, wherein the subject has a disease or condition caused by a deficient amount of activity of target protein, and wherein the deficient amount of the target protein is caused by autosomal dominant inheritance.

[0185] In some embodiments, the method is a method of increasing the expression of the OPA1 protein by cells of a subject having an OPA1 pre-mRNA, wherein the subject has a disease or condition, e.g., Optic atrophy type 1, caused by a deficient amount of activity of OPA1, protein, and wherein the deficient amount of the OPA1 protein is caused by autosomal dominant inheritance.

[0186] In related embodiments, the method is a method of using an ASO to increase the expression of a protein or functional RNA. In some embodiments, an ASO may be used to increase the expression of target protein in cells of a subject having a target pre-mRNA, wherein the subject has a deficiency in the amount or function of a target protein.

[0187] In related embodiments, the method is a method of using an ASO to increase the expression of a protein or functional RNA. In some embodiments, an ASO may be used to increase the expression of OPA1 protein in cells of a subject having an OPA1 pre-mRNA, wherein the subject has a deficiency, e.g., Optic atrophy type 1; in the amount or function of an OPA1 protein.

[0188] In some embodiments, the pre-mRNA transcript that encodes the protein that is causative of the disease or condition is targeted by the agent, e.g., the oligonucleotides, described herein. In some cases, it is the NMD exon-containing pre-mRNA transcript targeted by the agent, e.g., the oligonucleotides, described herein. In some cases, the agent, e.g., the oligonucleotides, described herein, are designed to target a coding exon of the pre-mRNA. In some cases, the agent, e.g., the oligonucleotides, described herein can induce skipping of the NMD exon, a coding exon, or both. In some embodiments, a NMD exon-containing pre-mRNA transcript that encodes a protein that is not causative of the disease is targeted by the ASOs. For example, a disease that is the result of a mutation or deficiency of a first protein in a particular pathway may be ameliorated by targeting a pre-mRNA that encodes a second protein, thereby increasing production of the second protein. In some embodiments, the function of the second protein is able to compensate for the mutation or deficiency of the first protein (which is causative of the disease or condition).

[0189] In some embodiments, the subject has:
[0190] (a) a first mutant allele from which
   [0191] (i) the OPA1 protein is produced at a reduced level compared to production from a wild-type allele,
   [0192] (ii) the OPA1 protein is produced in a form having reduced function compared to an equivalent wild-type protein, or
   [0193] (iii) the OPA1 protein or functional RNA is not produced; and
[0194] (b) a second mutant allele from which
   [0195] (i) the OPA1 protein is produced at a reduced level compared to production from a wild-type allele,
   [0196] (ii) the OPA1 protein is produced in a form having reduced function compared to an equivalent wild-type protein, or
   [0197] (iii) the OPA1 protein is not produced, and
      wherein the NMD exon-containing pre-mRNA is transcribed from the first allele and/or the second allele. In these embodiments, the ASO binds to a targeted portion of the NMD exon-containing pre-mRNA transcribed from the first allele or the second allele, thereby inducing exon skipping of the pseudo-exon from the NMD exon-containing pre-mRNA, and causing an increase in the level of mRNA encoding OPA1 protein and an increase in the expression of the target protein or functional RNA in the cells of the subject. In these embodiments, the target protein or functional RNA having an increase in expression level resulting from the exon skipping of the pseudo-exon from the NMD exon-containing pre-mRNA may be either in a form having reduced function compared to the equivalent wild-type protein (partially-functional), or having full function compared to the equivalent wild-type protein (fully-functional).

[0198] In some embodiments, the subject has:
[0199] (a) a first mutant allele from which
   [0200] (i) the OPA1 protein is produced at a reduced level compared to production from a wild-type allele,
   [0201] (ii) the OPA1 protein is produced in a form having reduced function compared to an equivalent wild-type protein, or
   [0202] (iii) the OPA1 protein or functional RNA is not produced; and
[0203] (b) a second mutant allele from which
   [0204] (i) the OPA1 protein is produced at a reduced level compared to production from a wild-type allele,
   [0205] (ii) the OPA1 protein is produced in a form having reduced function compared to an equivalent wild-type protein, or
   [0206] (iii) the OPA1 protein is not produced, and
      wherein the OPA1 pre-mRNA is transcribed from the first allele and/or the second allele. In these embodiments, the ASO binds to a targeted portion of the OPA1 pre-mRNA transcribed from the first allele or the second allele, thereby inducing exon skipping of a coding exon from the OPA1 pre-mRNA, and causing an increase in the expression of the target OPA1 protein in the cells of the subject. In these embodiments, the target OPA1 protein having an increase in expression level resulting from the exon skipping of the coding exon from the OPA1 pre-mRNA may be either in a form having reduced function compared to the equivalent full-length wild-type protein (partially-functional), or having full function compared to the equivalent full-length wild-type protein (fully-functional).

[0207] In some embodiments, the level of mRNA encoding OPA1 protein is increased 1.1 to 10-fold, when compared to the amount of mRNA encoding OPA1 protein that is produced in a control cell, e.g., one that is not treated with the antisense oligomer or one that is treated with an antisense oligomer that does not bind to the targeted portion of the OPA1 pre-mRNA.

[0208] In some embodiments, a level of the OPA1 protein expressed in the cell contacted with the agent disclosed herein or the vector encoding the agent is increased compared to the level of the OPA1 protein in a control cell not contacted with the agent or the vector encoding the agent. In some cases, a level of the OPA1 protein expressed in the cell contacted with the agent or the vector encoding the agent is increased by about 1.1 to about 10-fold, about 1.5 to about 10-fold, about 2 to about 10-fold, about 3 to about 10-fold, about 4 to about 10-fold, about 1.1 to about 5-fold, about 1.1 to about 6-fold, about 1.1 to about 7-fold, about 1.1 to about 8-fold, about 1.1 to about 9-fold, about 2 to about 5-fold, about 2 to about 6-fold, about 2 to about 7-fold, about 2 to about 8-fold, about 2 to about 9-fold, about 3 to about 6-fold, about 3 to about 7-fold, about 3 to about 8-fold, about 3 to about 9-fold, about 4 to about 7-fold, about 4 to about 8-fold, about 4 to about 9-fold, at least about 1.1-fold, at least about 1.5-fold, at least about 2-fold, at least about 2.5-fold, at least about 3-fold, at least about 3.5-fold, at least about 4-fold, at least about 5-fold, or at least about 10-fold, compared to the level of the OPA1 protein in a control cell not contacted with the agent or the vector encoding the agent.

[0209] In some cases, a level of the OPA1 protein expressed in the cell contacted with the agent disclosed herein or the vector encoding the agent is increased by about 1.1 to about 10-fold, about 1.5 to about 10-fold, about 2 to about 10-fold, about 3 to about 10-fold, about 4 to about 10-fold, about 1.1 to about 5-fold, about 1.1 to about 6-fold, about 1.1 to about 7-fold, about 1.1 to about 8-fold, about 1.1 to about 9-fold, about 2 to about 5-fold, about 2 to about 6-fold, about 2 to about 7-fold, about 2 to about 8-fold, about 2 to about 9-fold, about 3 to about 6-fold, about 3 to about 7-fold, about 3 to about 8-fold, about 3 to about 9-fold, about 4 to about 7-fold, about 4 to about 8-fold, about 4 to about 9-fold, at least about 1.1-fold, at least about 1.5-fold, at least about 2-fold, at least about 2.5-fold, at least about 3-fold, at least about 3.5-fold, at least about 4-fold, at least about 5-fold, or at least about 10-fold, compared to in the absence of the agent.

[0210] In some embodiments, the OPA1 protein translated from the processed mRNA is a functional OPA1 protein. In some embodiments, the OPA1 protein translated from the processed mRNA is fully functional. In some embodiments, the OPA1 protein translated from the processed mRNA is a wild-type OPA1 protein. In some embodiments, the OPA1 protein translated from the processed mRNA is a full-length OPA1 protein. In some embodiments, the OPA1 protein translated from the processed mRNA has at least 80%, 82%, 84%, 85%, 86%, 88%, 90%, 91%, 92%, 93%, 94%, 9%, 96%, 97%, 98%, or 99%, or 100% sequence identity to any sequence listed in Table 2. In some embodiments, the OPA1 protein translated from the processed mRNA has at least 80%, 82%, 84%, 85%, 86%, 88%, 90%, 91%, 92%, 93%, 94%, 9%, 96%, 97%, 98%, or 99%, or 100% sequence identity to the sequence selected from the group consisting of SEQ ID NOs: 1272-1280.

[0211] In some embodiments, a subject treated using the methods of the present disclosure expresses a partially functional OPA1 protein from one allele, wherein the partially functional OPA1 protein may be caused by a frameshift mutation, a nonsense mutation, a missense mutation, or a partial gene deletion. In some embodiments, a subject treated using the methods of the disclosure expresses a nonfunctional OPA1 protein from one allele, wherein the nonfunctional OPA1 protein may be caused by a frameshift mutation, a nonsense mutation, a missense mutation, a partial gene deletion, in one allele. In some embodiments, a subject treated using the methods of the disclosure has an OPA1 whole gene deletion, in one allele.

### Therapeutic Agents

[0212] In various embodiments of the present disclosure, compositions and methods comprising a therapeutic agent are provided to modulate protein expression level of a target protein, e.g., OPA1 protein. In some embodiments, provided herein are compositions and methods to modulate translation of target processed mRNA, e.g., OPA1 processed mRNA. In some embodiments, provided herein are compositions and methods to modulate alternative splicing of target pre-mRNA, e.g., OPA1 pre-mRNA. In some embodiments, provided herein are compositions and methods to induce exon skipping in the splicing of target pre-mRNA, e.g., OPA1 pre-mRNA e.g., to induce skipping of a pseudo-exon during splicing of target pre-mRNA, e.g., OPA1 pre-mRNA.

[0213] A therapeutic agent disclosed herein can be a translation modulator, e.g., an agent disclosed herein that modulates translation of a processed mRNA that encodes a target protein. A therapeutic agent disclosed herein can be a NIE repressor agent. A therapeutic agent may comprise a polynucleic acid polymer.

[0214] According to one aspect of the present disclosure, provided herein is a method of treatment or prevention of a condition or disease associated with a functional OPA1 protein deficiency, comprising administering a NIE repressor agent to a subject to increase levels of functional OPA1 protein, wherein the agent binds to a region of the pre-mRNA transcript to decrease inclusion of the NMD exon in the mature transcript. For example, provided herein is a method of treatment or prevention of a condition associated with a functional OPA1 protein deficiency, comprising administering a NIE repressor agent to a subject to increase levels of functional OPA1 protein, wherein the agent binds to a region of an intron containing an NMD exon (e.g., exon 6x of OPA1, exon 7x of OPA1, or exon 28x of OPA1) of the pre-mRNA transcript or to a NMD exon-activating regulatory sequence in the same intron. For example, provided herein is a method of treatment or prevention of a condition associated with a functional OPA1 protein deficiency, comprising administering a NIE repressor agent to a subject to increase levels of functional OPA1 protein, wherein the agent binds to a region of an intron containing an NMD exon (e.g., exon (GRCh38/hg38: chr3 193628509 193628616) of OPA1; or exon (GRCh38/hg38: chr3 193603500 193603557) of OPA1) of the pre-mRNA transcript or to a NMD exon-activating regulatory sequence in the same intron. In some embodiments, the method comprises administering a NIE repressor agent to a subject to increase levels of functional OPA1 protein, wherein the agent binds to a region of an intron containing an NMD exon (e.g., exon of OPA1 other than exon 7x defined by (GRCh38/hg38: chr3 193628509 193628616) or exon defined by (GRCh38/hg38: chr3 193603500 193603557)) of the pre-mRNA transcript or to a NMD exon-activating regulatory sequence in the same intron. In some embodiments, the therapeutic agent promotes exclusion of an NMD exon of OPA1 pre-mRNA other than exon 7x defined by (GRCh38/hg38: chr3 193628509 193628616) or exon defined by (GRCh38/hg38: chr3 193603500 193603557). In some embodiments, the composition disclosed herein includes an agent that promotes exclusion of an NMD exon of OPA1 pre-mRNA other than exon 7x defined by (GRCh38/hg38: chr3 193628509 193628616) or exon defined by (GRCh38/hg38: chr3 193603500 193603557).

[0215] Where reference is made to reducing NMD exon inclusion in the mature mRNA, the reduction may be complete, e.g., 100%, or may be partial. The reduction may be clinically significant. The reduction/correction may be relative to the level of NMD exon inclusion in the subject without treatment, or relative to the amount of NMD exon inclusion in a population of similar subjects. The reduction/correction may be at least 10% less NMD exon inclusion relative to the average subject, or the subject prior to treatment. The reduction may be at least 20% less NMD exon inclusion relative to an average subject, or the subject prior to treatment. The reduction may be at least 40% less NMD exon inclusion relative to an average subject, or the subject prior to treatment. The reduction may be at least 50% less NMD exon inclusion relative to an average subject, or the subject prior to treatment. The reduction may be at least 60% less NMD exon inclusion relative to an average subject, or the subject prior to treatment. The reduction may be at least 80% less NMD exon inclusion relative to an average subject, or the subject prior to treatment. The reduction may be at least 90% less NMD exon inclusion relative to an average subject, or the subject prior to treatment.

[0216] According to one aspect of the present disclosure, provided herein is a method of treatment or prevention of a condition or disease associated with a functional OPA1 protein deficiency, comprising administering an agent to a subject to increase levels of functional OPA1 protein, wherein the agent binds to a region of the pre-mRNA transcript to decrease inclusion of a coding exon (e.g., exon 7) in the mature transcript. For example, provided herein is a method of treatment or prevention of a condition associated with a functional OPA1 protein deficiency, comprising administering an agent to a subject to increase levels of functional OPA1 protein, wherein the agent binds to a region containing a coding exon (e.g., exon 7 of OPA1) of the pre-mRNA transcript. For example, provided herein is a method of treatment or prevention of a condition associated with a functional OPA1 protein deficiency, comprising administering an agent to a subject to increase levels of functional OPA1 protein, wherein the agent binds to a region containing a coding exon (e.g., exon (GRCh38/hg38: chr3 193626092 to 193626202) of OPA1) of the pre-mRNA transcript. In some embodiments, the method comprises administering an agent to a subject to increase levels of functional OPA1 protein, wherein the agent binds to a region containing a coding exon (e.g., exon of OPA1 other than exon 7 defined by (GRCh38/hg38: chr3 193626092 to 193626202)) of the pre-mRNA transcript. In some embodiments, the therapeutic agent promotes exclusion of a coding exon of OPA1 pre-mRNA other than exon 7 defined by (GRCh38/hg38: chr3 193626092 to 193626202). In some embodiments, the composition disclosed herein includes an agent that promotes exclusion of a coding exon of OPA1 pre-mRNA other than exon 7 defined by (GRCh38/hg38: chr3 193626092 to 193626202).

[0217] Where reference is made to increasing active OPA1 protein levels, the increase may be clinically significant. The increase may be relative to the level of active OPA1 protein in the subject without treatment, or relative to the amount of active OPA1 protein in a population of similar subjects. The increase may be at least 10% more active OPA1 protein relative to the average subject, or the subject prior to treatment. The increase may be at least 20% more active OPA1 protein relative to the average subject, or the subject prior to treatment. The increase may be at least 40% more active OPA1 protein relative to the average subject, or the subject prior to treatment. The increase may be at least 50% more active OPA1 protein relative to the average subject, or the subject prior to treatment. The increase may be at least 80% more active OPA1 protein relative to the average subject, or the subject prior to treatment. The increase may be at least 100% more active OPA1 protein relative to the average subject, or the subject prior to treatment. The increase may be at least 200% more active OPA1 protein relative to the average subject, or the subject prior to treatment. The increase may be at least 500% more active OPA1 protein relative to the average subject, or the subject prior to treatment.

[0218] In embodiments wherein the NIE repressor agent comprises a polynucleic acid polymer, the polynucleic acid polymer may be about 50 nucleotides in length. The polynucleic acid polymer may be about 45 nucleotides in length. The polynucleic acid polymer may be about 40 nucleotides in length. The polynucleic acid polymer may be about 35 nucleotides in length. The polynucleic acid polymer may be about 30 nucleotides in length. The polynucleic acid polymer may be about 24 nucleotides in length. The polynucleic acid polymer may be about 25 nucleotides in length. The polynucleic acid polymer may be about 20 nucleotides in length. The polynucleic acid polymer may be about 19 nucleotides in length. The polynucleic acid polymer may be about 18 nucleotides in length. The polynucleic acid polymer may be about 17 nucleotides in length. The polynucleic acid polymer may be about 16 nucleotides in length. The polynucleic acid polymer may be about 15 nucleotides in length. The polynucleic acid polymer may be about 14 nucleotides in length. The polynucleic acid polymer may be about 13 nucleotides in length. The polynucleic acid polymer may be about 12 nucleotides in length. The polynucleic acid polymer may be about 11 nucleotides in length. The polynucleic acid polymer may be about 10 nucleotides in length. The polynucleic acid polymer may be between about 10 and about 50 nucleotides in length. The polynucleic acid polymer may be between about 10 and about 45 nucleotides in length. The polynucleic acid polymer may be between about 10 and about 40 nucleotides in length. The polynucleic acid polymer may be between about 10 and about 35 nucleotides in length. The polynucleic acid polymer may be between about 10 and about 30 nucleotides in length. The polynucleic acid polymer may be between about 10 and about 25 nucleotides in length. The polynucleic acid polymer may be between about 10 and about 20 nucleotides in length. The polynucleic acid polymer may be between about 15 and about 25 nucleotides in length. The polynucleic acid polymer may be between about 15 and about 30 nucleotides in length. The polynucleic acid polymer may be between about 12 and about 30 nucleotides in length.

[0219] The sequence of the polynucleic acid polymer can be at least 50%, 55%, 60%, 65%, 70%, 75%, 80%, 85%, 90%, 91%, 92%, 93%, 94%, 95%, 96%, 97%, 98%, 99%, or 99.5% complementary to a target sequence of an mRNA transcript, e.g., a pre-mRNA transcript or a processed mRNA transcript. The sequence of the polynucleic acid polymer can be 100% complementary to a target sequence of a mRNA transcript (e.g., a pre-mRNA transcript or a processed mRNA transcript).

[0220] The sequence of the polynucleic acid polymer may have 4 or fewer mismatches to a target sequence of the mRNA transcript. The sequence of the polynucleic acid polymer may have 3 or fewer mismatches to a target sequence of the mRNA transcript. The sequence of the polynucleic acid polymer may have 2 or fewer mismatches to a target sequence of the mRNA transcript. The sequence of the polynucleic acid polymer may have 1 or fewer mismatches to a target sequence of the mRNA transcript. The sequence of the polynucleic acid polymer may have no mismatches to a target sequence of the mRNA transcript.

[0221] The polynucleic acid polymer may specifically hybridize to a target sequence of the mRNA transcript. For example, the polynucleic acid polymer may have 91%, 92%, 93%, 94%, 95%, 96%, 97%, 98%, 99%, 99.5% or 100% sequence complementarity to a target sequence of the mRNA transcript. The hybridization may be under high stringent hybridization conditions.

[0222] The polynucleic acid polymer comprising a sequence with at least 50%, 55%, 60%, 65%, 70%, 75%, 80%, 85%, 90%, 91%, 92%, 93%, 94%, 95%, 96%, 97%, 98%, 99%, or 99.5% sequence identity to a sequence selected from the group consisting of SEQ ID NOs: 2-5. The polynucleic acid polymer may comprise a sequence with 100% sequence identity to a sequence selected from the group consisting of SEQ ID NOs: 2-5.

[0223] Where reference is made to a polynucleic acid polymer sequence, the skilled person will understand that one or more substitutions may be tolerated, optionally two substitutions may be tolerated in the sequence, such that it maintains the ability to hybridize to the target sequence; or where the substitution is in a target sequence, the ability to be recognized as the target sequence. References to sequence identity may be determined by BLAST sequence alignment using standard/default parameters. For example, the sequence may have 99% identity and still function according to the present disclosure. In other embodiments, the sequence may have 98% identity and still function according to the present disclosure. In another embodiment, the sequence may have 95% identity and still function according to the present disclosure. In another embodiment, the sequence may have 90% identity and still function according to the present disclosure.

[0224] In some cases, an agent, e.g., a therapeutic agent, disclosed herein comprises a modified snRNA, such as a modified human or murine snRNA. In some cases, an agent, e.g., a therapeutic agent, comprises a vector, such as a viral vector, that encodes a modified snRNA. In some embodiments, the modified snRNA is a modified U1 snRNA (see, e.g., Alanis et al., Human Molecular Genetics, 2012, Vol. 21, No. 11 2389-2398). In some embodiments, the modified snRNA is a modified U7 snRNA (see, e.g., Gadgil et al., J Gene Med. 2021; 23:e3321). Modified U7 snRNAs can be made by any method known in the art including the methods described in Meyer, K.; Schumperli, Daniel (2012), Antisense Derivatives of U7 Small Nuclear RNA as Modulators of Pre-mRNA Splicing. In: Stamm, Stefan; Smith, Christopher W. J.; Lthrmann, Reinhard (eds.) Alternative pre-mRNA Splicing: Theory and Protocols (pp. 481-494), Chichester: John Wiley & Sons 10.1002/9783527636778.ch45, incorporated by reference herein in its entirety. In some embodiments, a modified U7 (smOPT) does not compete with WT U7 (Stefanovic et al., 1995).

[0225] In some embodiments, the modified snRNA comprises an smOPT modification. For example, the modified snRNA can comprise a sequence AAUUUUUGGAG (SEQ ID NO: 1311). For example, the sequence AAUUUUUGGAG (SEQ ID NO: 1311) can replace a sequence AAUUUGUCUAG (SEQ ID NO: 1312) in a wild-type U7 snRNA to generate the modified U& snRNA (smOPT). In some embodiments, a smOPT modification of a U7 snRNA renders the particle functionally inactive in histone pre-mRNA processing (Stefanovic et al., 1995). In some embodiments, a modified U7 (smOPT) is expressed stably in the nucleus and at higher levels than WT U7 (Stefanovic et al., 1995). In some embodiments, the snRNA comprises a U1 snRNP-targeted sequence. In some embodiments, the snRNA comprises a U7 snRNP-targeted sequence. In some embodiments, the snRNA comprises a modified U7 snRNP-targeted sequence and wherein the modified U7 snRNP-targeted sequence comprises smOPT. In some embodiments, the modified snRNA has been modified to comprise a single-stranded nucleotide sequence that hybridizes to a pre-mRNA, such as an ASCE-containing pre-mRNA. For example, the modified snRNA can be modified to comprise a single-stranded nucleotide sequence that hybridizes to an OPA1 pre-mRNA. In some embodiments, the modified snRNA has been modified to comprise a single-stranded nucleotide sequence that hybridizes to an OPA1 processed mRNA, e.g., 5′ UTR of OPA1 processed mRNA. In some embodiments, the modified snRNA has been modified to comprise a single-stranded nucleotide sequence that comprises one or two or more sequences of the ASOs disclosed herein. In some embodiments, the modified snRNA has been modified to comprise a single-stranded nucleotide sequence that hybridizes to a targeted portion of an OPA1 processed mRNA, or a targeted portion of an OPA1 pre-mRNA. In some embodiments, the modified snRNA has been modified to comprise a single-stranded nucleotide sequence that comprises two or more sequences that hybridize to two or more target regions of an OPA1 processed mRNA, or two or more target regions of an OPA1 pre-mRNA. For example, a modified snRNA can be modified to comprise a single-stranded nucleotide sequence that hybridizes to at least 8 contiguous nucleic acids of an OPA1 processed mRNA or an OPA1 pre-mRNA. In some embodiments, the modified snRNA has been modified to comprise a single-stranded nucleotide sequence that hybridizes to any of the target regions of an OPA1 processed mRNA or an OPA1 pre-mRNA disclosed herein. In some embodiments, the modified snRNA has been modified to comprise a single-stranded nucleotide sequence that comprises two or more sequences that hybridize to two or more target regions of an OPA1 processed mRNA or an OPA1 pre-mRNA.

### Antisense Oligomers

[0226] Provided herein is a composition comprising an antisense oligomer that induces exon skipping by binding to a targeted portion of an OPA1 processed mRNA or an OPA1 pre-mRNA, e.g., an OPA1 NMD exon-containing pre-mRNA. As used herein, the terms “ASO” and “antisense oligomer” are used interchangeably and refer to an oligomer such as a polynucleotide, comprising nucleobases that hybridizes to a target nucleic acid (e.g., an OPA1 processed mRNA or an OPA1 pre-mRNA, e.g., an OPA1 NMD exon-containing pre-mRNA) sequence by Watson-Crick base pairing or wobble base pairing (G-U). The ASO may have exact sequence complementary to the target sequence or near complementarity (e.g., sufficient complementarity to bind the target sequence and enhancing splicing at a splice site). ASOs are designed so that they bind (hybridize) to a target nucleic acid (e.g., a targeted portion of a mRNA transcript) and remain hybridized under physiological conditions. Typically, if they hybridize to a site other than the intended (targeted) nucleic acid sequence, they hybridize to a limited number of sequences that are not a target nucleic acid (to a few sites other than a target nucleic acid). Design of an ASO can take into consideration the occurrence of the nucleic acid sequence of the targeted portion of the mRNA transcript (the processed mRNA or the pre-mRNA) or a sufficiently similar nucleic acid sequence in other locations in the genome or cellular mRNA or transcriptome, such that the likelihood the ASO will bind other sites and cause “off-target” effects is limited. Any antisense oligomers known in the art (for example, in PCT Application No. PCT/US2014/054151, published as WO 2015/035091, titled “Reducing Nonsense-Mediated mRNA Decay,” incorporated by reference herein), can be used to practice the methods described herein.

[0227] In some embodiments, ASOs “specifically hybridize” to or are “specific” to a target nucleic acid or a targeted portion of an OPA1 processed mRNA or an OPA1 pre-mRNA, e.g., a NMD exon-containing pre-mRNA. Typically, such hybridization occurs with a Tₘ substantially greater than 37° C., preferably at least 50° C., and typically between 60° C. to approximately 90° C. Such hybridization preferably corresponds to stringent hybridization conditions. At a given ionic strength and pH, the Tₘ is the temperature at which 50% of a target sequence hybridizes to a complementary oligonucleotide.

[0228] Oligomers, such as oligonucleotides, are “complementary” to one another when hybridization occurs in an antiparallel configuration between two single-stranded polynucleotides. A double-stranded polynucleotide can be “complementary” to another polynucleotide, if hybridization can occur between one of the strands of the first polynucleotide and the second. Complementarity (the degree to which one polynucleotide is complementary with another) is quantifiable in terms of the proportion (e.g., the percentage) of bases in opposing strands that are expected to form hydrogen bonds with each other, according to generally accepted base-pairing rules. The sequence of an antisense oligomer (ASO) need not be 100% complementary to that of its target nucleic acid to hybridize. In certain embodiments, ASOs can comprise at least 70%, at least 75%, at least 80%, at least 85%, at least 90%, at least 95%, at least 96%, at least 97%, at least 98%, or at least 99% sequence complementarity to a target region within the target nucleic acid sequence to which they are targeted. For example, an ASO in which 18 of 20 nucleobases of the oligomeric compound are complementary to a target region, and would therefore specifically hybridize, would represent 90 percent complementarity. In this example, the remaining non-complementary nucleobases may be clustered together or interspersed with complementary nucleobases and need not be contiguous to each other or to complementary nucleobases. Percent complementarity of an ASO with a region of a target nucleic acid can be determined routinely using BLAST programs (basic local alignment search tools) and PowerBLAST programs known in the art (Altschul, et al., J. Mol. Biol., 1990, 215, 403-410; Zhang and Madden, Genome Res., 1997, 7, 649-656).

[0229] An ASO need not hybridize to all nucleobases in a target sequence and the nucleobases to which it does hybridize may be contiguous or noncontiguous. ASOs may hybridize over one or more segments of a pre-mRNA transcript, such that intervening or adjacent segments are not involved in the hybridization event (e.g., a loop structure or hairpin structure may be formed). In certain embodiments, an ASO hybridizes to noncontiguous nucleobases in a target pre-mRNA transcript. For example, an ASO can hybridize to nucleobases in a pre-mRNA transcript that are separated by one or more nucleobase(s) to which the ASO does not hybridize.

[0230] The ASOs described herein comprise nucleobases that are complementary to nucleobases present in a target portion of an OPA1 processed mRNA or an OPA1 pre-mRNA, e.g., a NMD exon-containing pre-mRNA. The term ASO embodies oligonucleotides and any other oligomeric molecule that comprises nucleobases capable of hybridizing to a complementary nucleobase on a target mRNA but does not comprise a sugar moiety, such as a peptide nucleic acid (PNA). The ASOs may comprise naturally-occurring nucleotides, nucleotide analogs, modified nucleotides, or any combination of two or three of the preceding. The term “naturally occurring nucleotides” includes deoxyribonucleotides and ribonucleotides. The term “modified nucleotides” includes nucleotides with modified or substituted sugar groups and/or having a modified backbone. In some embodiments, all of the nucleotides of the ASO are modified nucleotides. Chemical modifications of ASOs or components of ASOs that are compatible with the methods and compositions described herein will be evident to one of skill in the art and can be found, for example, in U.S. Pat. Nos. 6,147,200, 8,258,109, 5,656,612, U.S. Patent Publication No. 2012/0190728, and Dias and Stein, Mol. Cancer Ther. 2002, 347-355, herein incorporated by reference in their entirety.

[0231] One or more nucleobases of an ASO may be any naturally occurring, unmodified nucleobase such as adenine, guanine, cytosine, thymine and uracil, or any synthetic or modified nucleobase that is sufficiently similar to an unmodified nucleobase such that it is capable of hydrogen bonding with a nucleobase present on a target pre-mRNA. Examples of modified nucleobases include, without limitation, hypoxanthine, xanthine, 7-methylguanine, 5, 6-dihydrouracil, 5-methylcytosine, and 5-hydroxymethoylcytosine.

[0232] The ASOs described herein also comprise a backbone structure that connects the components of an oligomer. The term “backbone structure” and “oligomer linkages” may be used interchangeably and refer to the connection between monomers of the ASO. In naturally occurring oligonucleotides, the backbone comprises a 3′-5′ phosphodiester linkage connecting sugar moieties of the oligomer. The backbone structure or oligomer linkages of the ASOs described herein may include (but are not limited to) phosphorothioate, phosphorodithioate, phosphoroselenoate, phosphorodiselenoate, phosphoroanilothioate, phosphoraniladate, phosphoramidate, and the like. See, e.g., LaPlanche, et al., Nucleic Acids Res. 14:9081 (1986); Stec, et al., J. Am. Chem. Soc. 106:6077 (1984), Stein, et al., Nucleic Acids Res. 16:3209 (1988), Zon, et al., Anti-Cancer Drug Design 6:539 (1991); Zon, et al., Oligonucleotides and Analogues: A Practical Approach, pp. 87-108 (F. Eckstein, Ed., Oxford University Press, Oxford England (1991)); Stec, et al., U.S. Pat. No. 5,151,510; Uhlmann and Peyman, Chemical Reviews 90:543 (1990). In some embodiments, the backbone structure of the ASO does not contain phosphorous but rather contains peptide bonds, for example in a peptide nucleic acid (PNA), or linking groups including carbamate, amides, and linear and cyclic hydrocarbon groups. In some embodiments, the backbone modification is a phosphorothioate linkage. In some embodiments, the backbone modification is a phosphoramidate linkage.

[0233] In some embodiments, the stereochemistry at each of the phosphorus internucleotide linkages of the ASO backbone is random. In some embodiments, the stereochemistry at each of the phosphorus internucleotide linkages of the ASO backbone is controlled and is not random. For example, U.S. Pat. App. Pub. No. 2014/0194610, “Methods for the Synthesis of Functionalized Nucleic Acids,” incorporated herein by reference, describes methods for independently selecting the handedness of chirality at each phosphorous atom in a nucleic acid oligomer. In some embodiments, an ASO used in the methods of the disclosure, including, but not limited to, any of the ASOs set forth herein in Tables 5 and 6, comprises an ASO having phosphorus internucleotide linkages that are not random. In some embodiments, a composition used in the methods of the disclosure comprises a pure diastereomeric ASO. In some embodiments, a composition used in the methods of the disclosure comprises an ASO that has diastereomeric purity of at least about 90%, at least about 91%, at least about 92%, at least about 93%, at least about 94%, at least about 95%, at least about 96%, at least about 97%, at least about 98%, at least about 99%, about 100%, about 90% to about 100%, about 91% to about 100%, about 92% to about 100%, about 93% to about 100%, about 94% to about 100%, about 95% to about 100%, about 96% to about 100%, about 97% to about 100%, about 98% to about 100%, or about 99% to about 100%.

[0234] In some embodiments, the ASO has a nonrandom mixture of Rp and Sp configurations at its phosphorus internucleotide linkages. For example, it has been suggested that a mix of Rp and Sp is required in antisense oligonucleotides to achieve a balance between good activity and nuclease stability (Wan, et al., 2014, “Synthesis, biophysical properties and biological activity of second generation antisense oligonucleotides containing chiral phosphorothioate linkages,” Nucleic Acids Research 42(22): 13456-13468, incorporated herein by reference). In some embodiments, an ASO used in the methods of the disclosure, including, but not limited to, any of the ASOs set forth herein in SEQ ID NOs: 2-5, comprises about 5-100% Rp, at least about 5% Rp, at least about 10% Rp, at least about 15% Rp, at least about 20% Rp, at least about 25% Rp, at least about 30% Rp, at least about 35% Rp, at least about 40% Rp, at least about 45% Rp, at least about 50% Rp, at least about 55% Rp, at least about 60% Rp, at least about 65% Rp, at least about 70% Rp, at least about 75% Rp, at least about 80% Rp, at least about 85% Rp, at least about 90% Rp, or at least about 95% Rp, with the remainder Sp, or about 100% Rp. In some embodiments, an ASO used in the methods of the disclosure, including, but not limited to, any of the ASOs set forth herein comprise a sequence with at least about 80%, 85%, 90%, 95%, 97%, or 100% sequence identity to a region comprising at least 8 contiguous nucleic acids of any one of SEQ ID NOs: 2-5, comprises about 10% to about 100% Rp, about 15% to about 100% Rp, about 20% to about 100% Rp, about 25% to about 100% Rp, about 30% to about 100% Rp, about 35% to about 100% Rp, about 40% to about 100% Rp, about 45% to about 100% Rp, about 50% to about 100% Rp, about 55% to about 100% Rp, about 60% to about 100% Rp, about 65% to about 100% Rp, about 70% to about 100% Rp, about 75% to about 100% Rp, about 80% to about 100% Rp, about 85% to about 100% Rp, about 90% to about 100% Rp, or about 95% to about 100% Rp, about 20% to about 80% Rp, about 25% to about 75% Rp, about 30% to about 70% Rp, about 40% to about 60% Rp, or about 45% to about 55% Rp, with the remainder Sp.

[0235] In some embodiments, an ASO used in the methods of the disclosure, including, but not limited to, any of the ASOs set forth herein comprise a sequence with at least about 80%, 85%, 90%, 95%, 97%, or 100% sequence identity to a region comprising at least 8 contiguous nucleic acids of any one of SEQ ID NOs: 2-5, comprises about 5-100% Sp, at least about 5% Sp, at least about 10% Sp, at least about 15% Sp, at least about 20% Sp, at least about 25% Sp, at least about 30% Sp, at least about 35% Sp, at least about 40% Sp, at least about 45% Sp, at least about 50% Sp, at least about 55% Sp, at least about 60% Sp, at least about 65% Sp, at least about 70% Sp, at least about 75% Sp, at least about 80% Sp, at least about 85% Sp, at least about 90% Sp, or at least about 95% Sp, with the remainder Rp, or about 100% Sp. In embodiments, an ASO used in the methods of the disclosure, including, but not limited to, any of the ASOs set forth herein comprise a sequence with at least about 80%, 85%, 90%, 95%, 97%, or 100% sequence identity to a region comprising at least 8 contiguous nucleic acids of any one of SEQ ID NOs: 2-5, comprises about 10% to about 100% Sp, about 15% to about 100% Sp, about 20% to about 100% Sp, about 25% to about 100% Sp, about 30% to about 100% Sp, about 35% to about 100% Sp, about 40% to about 100% Sp, about 45% to about 100% Sp, about 50% to about 100% Sp, about 55% to about 100% Sp, about 60% to about 100% Sp, about 65% to about 100% Sp, about 70% to about 100% Sp, about 75% to about 100% Sp, about 80% to about 100% Sp, about 85% to about 100% Sp, about 90% to about 100% Sp, or about 95% to about 100% Sp, about 20% to about 80% Sp, about 25% to about 75% Sp, about 30% to about 70% Sp, about 40% to about 60% Sp, or about 45% to about 55% Sp, with the remainder Rp.

[0236] Any of the ASOs described herein may contain a sugar moiety that comprises ribose or deoxyribose, as present in naturally occurring nucleotides, or a modified sugar moiety or sugar analog, including a morpholine ring. Non-limiting examples of modified sugar moieties include 2′ substitutions such as 2′-O-methyl (2′-O-Me), 2′-O-methoxyethyl (2′MOE), 2′-O-aminoethyl, 2′-O—N-methyl-acetamide (2′-NMA); 2′F; N3′→P5′ phosphoramidate, 2′dimethylaminooxyethoxy, 2′dimethylaminoethoxyethoxy, 2′-guanidinidium, 2′-O-guanidinium ethyl, carbamate modified sugars, and bicyclic modified sugars. In some embodiments, the sugar moiety modification is selected from 2′-O-Me, 2′F, and 2′MOE. In some embodiments, the sugar moiety modification is an extra bridge bond, such as in a locked nucleic acid (LNA). In some embodiments the sugar analog contains a morpholine ring, such as phosphorodiamidate morpholino (PMO). In some embodiments, the sugar moiety comprises a ribofuranosyl or 2′deoxyribofuransyl modification. In some embodiments, the sugar moiety comprises 2′4′-constrained 2′O-methyloxyethyl (cMOE) modifications. In some embodiments, the sugar moiety comprises cEt 2′, 4′ constrained 2′-O ethyl BNA modifications. In some embodiments, the sugar moiety comprises tricycloDNA (tcDNA) modifications. In some embodiments, the sugar moiety comprises ethylene nucleic acid (ENA) modifications. In some embodiments, the sugar moiety comprises MCE modifications. Modifications are known in the art and described in the literature, e.g., by Jarver, et al., 2014, “A Chemical View of Oligonucleotides for Exon Skipping and Related Drug Applications,” Nucleic Acid Therapeutics 24(1): 37-47, incorporated by reference for this purpose herein.

[0237] In some embodiments, each monomer of the ASO is modified in the same way, for example each linkage of the backbone of the ASO comprises a phosphorothioate linkage or each ribose sugar moiety comprises a 2′O-methyl modification. Such modifications that are present on each of the monomer components of an ASO are referred to as “uniform modifications.” In some examples, a combination of different modifications may be desired, for example, an ASO may comprise a combination of phosphorodiamidate linkages and sugar moieties comprising morpholine rings (morpholinos). Combinations of different modifications to an ASO are referred to as “mixed modifications” or “mixed chemistries.”

[0238] In some embodiments, the ASO comprises one or more backbone modifications. In some embodiments, the ASO comprises one or more sugar moiety modification. In some embodiments, the ASO comprises one or more backbone modifications and one or more sugar moiety modifications. In some embodiments, the ASO comprises a 2′MOE modification and a phosphorothioate backbone. In some embodiments, the ASO comprises a phosphorodiamidate morpholino (PMO). In some embodiments, the ASO comprises a peptide nucleic acid (PNA). Any of the ASOs or any component of an ASO (e.g., a nucleobase, sugar moiety, backbone) described herein may be modified in order to achieve desired properties or activities of the ASO or reduce undesired properties or activities of the ASO. For example, an ASO or one or more components of any ASO may be modified to enhance binding affinity to a target sequence on a pre-mRNA transcript; reduce binding to any non-target sequence; reduce degradation by cellular nucleases (i.e., RNase H); improve uptake of the ASO into a cell and/or into the nucleus of a cell; alter the pharmacokinetics or pharmacodynamics of the ASO; and/or modulate the half-life of the ASO.

[0239] In some embodiments, the ASOs are comprised of 2′-O-(2-methoxyethyl) (MOE) phosphorothioate-modified nucleotides. In some embodiments, the ASOs are comprised of 2′NMA phosphorothioate-modified nucleotides. ASOs comprised of such nucleotides are especially well-suited to the methods disclosed herein; oligomers having such modifications have been shown to have significantly enhanced resistance to nuclease degradation and increased bioavailability, making them suitable, for example, for oral delivery in some embodiments described herein. See e.g., Geary, et al., J Pharmacol Exp Ther. 2001; 296(3):890-7; Geary, et al., J Pharmacol Exp Ther. 2001; 296(3):898-904.

[0240] Methods of synthesizing ASOs will be known to one of skill in the art. Alternatively or in addition, ASOs may be obtained from a commercial source.

[0241] Unless specified otherwise, the left-hand end of single-stranded nucleic acid (e.g., pre-mRNA transcript, oligonucleotide, ASO, etc.) sequences is the 5′ end and the left-hand direction of single or double-stranded nucleic acid sequences is referred to as the 5′ direction. Similarly, the right-hand end or direction of a nucleic acid sequence (single or double stranded) is the 3′ end or direction. Generally, a region or sequence that is 5′ to a reference point in a nucleic acid is referred to as “upstream,” and a region or sequence that is 3′ to a reference point in a nucleic acid is referred to as “downstream.” Generally, the 5′ direction or end of an mRNA is where the initiation or start codon is located, while the 3′ end or direction is where the termination codon is located. In some aspects, nucleotides that are upstream of a reference point in a nucleic acid may be designated by a negative number, while nucleotides that are downstream of a reference point may be designated by a positive number. For example, a reference point (e.g., an exon-exon junction in mRNA) may be designated as the “zero” site, and a nucleotide that is directly adjacent and upstream of the reference point is designated “minus one,” e.g., “−1,” while a nucleotide that is directly adjacent and downstream of the reference point is designated “plus one,” e.g., “+1.”

[0242] In some embodiments, the ASOs are complementary to (and bind to) a targeted portion of an OPA1 pre-mRNA, e.g., an OPA1 NMD exon-containing pre-mRNA, that is downstream (in the 3′ direction) of the 5′ splice site (or 3′ end of the NMD exon) of the included exon in an OPA1 pre-mRNA (e.g., the direction designated by positive numbers relative to the 5′ splice site). In some embodiments, the ASOs are complementary to a targeted portion of the OPA1 pre-mRNA, e.g., the OPA1 NMD exon-containing pre-mRNA that is within the region about +1 to about +500 relative to the 5′ splice site (or 3′ end) of the included exon. In some embodiments, the ASOs may be complementary to a targeted portion of an OPA1 pre-mRNA, e.g., an OPA1 NMD exon-containing pre-mRNA, that is within the region between nucleotides +6 and +40,000 relative to the 5′ splice site (or 3′ end) of the included exon. In some aspects, the ASOs are complementary to a targeted portion that is within the region about +1 to about +40,000, about +1 to about +30,000, about +1 to about +20,000, about +1 to about +15,000, about +1 to about +10,000, about +1 to about +5,000, about +1 to about +4,000, about +1 to about +3,000, about +1 to about +2,000, about +1 to about +1,000, about +1 to about +500, about +1 to about +490, about +1 to about +480, about +1 to about +470, about +1 to about +460, about +1 to about +450, about +1 to about +440, about +1 to about +430, about +1 to about +420, about +1 to about +410, about +1 to about +400, about +1 to about +390, about +1 to about +380, about +1 to about +370, about +1 to about +360, about +1 to about +350, about +1 to about +340, about +1 to about +330, about +1 to about +320, about +1 to about +310, about +1 to about +300, about +1 to about +290, about +1 to about +280, about +1 to about +270, about +1 to about +260, about +1 to about +250, about +1 to about +240, about +1 to about +230, about +1 to about +220, about +1 to about +210, about +1 to about +200, about +1 to about +190, about +1 to about +180, about +1 to about +170, about +1 to about +160, about +1 to about +150, about +1 to about +140, about +1 to about +130, about +1 to about +120, about +1 to about +110, about +1 to about +100, about +1 to about +90, about +1 to about +80, about +1 to about +70, about +1 to about +60, about +1 to about +50, about +1 to about +40, about +1 to about +30, or about +1 to about +20 relative to 5′ splice site (or 3′ end) of the included exon. In some aspects, the ASOs are complementary to a targeted portion that is within the region from about +1 to about +100, from about +100 to about +200, from about +200 to about +300, from about +300 to about +400, or from about +400 to about +500 relative to 5′ splice site (or 3′ end) of the included exon.

[0243] In some embodiments, the ASOs are complementary to (and bind to) a targeted portion of an OPA1 pre-mRNA, e.g., an OPA1 NMD exon-containing pre-mRNA, that is upstream (in the 5′ direction) of the 5′ splice site (or 3′ end) of the included exon in an OPA1 pre-mRNA, e.g., an OPA1 NMD exon-containing pre-mRNA (e.g., the direction designated by negative numbers relative to the 5′ splice site). In some embodiments, the ASOs are complementary to a targeted portion of the OPA1 pre-mRNA, e.g., the OPA1 NMD exon-containing pre-mRNA, that is within the region about −4 to about −270 relative to the 5′ splice site (or 3′end) of the included exon. In some embodiments, the ASOs may be complementary to a targeted portion of an OPA1 pre-mRNA, e.g., an OPA1 NMD exon-containing pre-mRNA, that is within the region between nucleotides −1 and −40,000 relative to the 5′ splice site (or 3′ end) of the included exon. In some aspects, the ASOs are complementary to a targeted portion that is within the region about −1 to about −40,000, about −1 to about −30,000, about −1 to about −20,000, about −1 to about −15,000, about −1 to about −10,000, about −1 to about −5,000, about −1 to about −4,000, about −1 to about −3,000, about −1 to about −2,000, about −1 to about −1,000, about −1 to about −500, about −1 to about −490, about −1 to about −480, about −1 to about −470, about −1 to about −460, about −1 to about −450, about −1 to about −440, about −1 to about −430, about −1 to about −420, about −1 to about −410, about −1 to about −400, about −1 to about −390, about −1 to about −380, about −1 to about −370, about −1 to about −360, about −1 to about −350, about −1 to about −340, about −1 to about −330, about −1 to about −320, about −1 to about −310, about −1 to about −300, about −1 to about −290, about −1 to about −280, about −1 to about −270, about −1 to about −260, about −1 to about −250, about −1 to about −240, about −1 to about −230, about −1 to about −220, about −1 to about −210, about −1 to about −200, about −1 to about −190, about −1 to about −180, about −1 to about −170, about −1 to about −160, about −1 to about −150, about −1 to about −140, about −1 to about −130, about −1 to about −120, about −1 to about −110, about −1 to about −100, about −1 to about −90, about −1 to about −80, about −1 to about −70, about −1 to about −60, about −1 to about −50, about −1 to about −40, about −1 to about −30, or about −1 to about −20 relative to 5′ splice site (or 3′ end) of the included exon.

[0244] In some embodiments, the ASOs are complementary to a targeted region of an OPA1 pre-mRNA, e.g., an OPA1 NMD exon-containing pre-mRNA, that is upstream (in the 5′ direction) of the 3′ splice site (or 5′ end) of the included exon in an OPA1 pre-mRNA (e.g., in the direction designated by negative numbers). In some embodiments, the ASOs are complementary to a targeted portion of the OPA1 pre-mRNA, e.g., the OPA1 NMD exon-containing pre-mRNA, that is within the region about −1 to about −500 relative to the 3′ splice site (or 5′ end) of the included exon. In some embodiments, the ASOs are complementary to a targeted portion of the OPA1 pre-mRNA that is within the region −1 to −40,000 relative to the 3′ splice site of the included exon. In some aspects, the ASOs are complementary to a targeted portion that is within the region about −1 to about −40,000, about −1 to about −30,000, −1 to about −20,000, about −1 to about −15,000, about −1 to about −10,000, about −1 to about −5,000, about −1 to about −4,000, about −1 to about −3,000, about −1 to about −2,000, about −1 to about −1,000, about −1 to about −500, about −1 to about −490, about −1 to about −480, about −1 to about −470, about −1 to about −460, about −1 to about −450, about −1 to about −440, about −1 to about −430, about −1 to about −420, about −1 to about −410, about −1 to about −400, about −1 to about −390, about −1 to about −380, about −1 to about −370, about −1 to about −360, about −1 to about −350, about −1 to about −340, about −1 to about −330, about −1 to about −320, about −1 to about −310, about −1 to about −300, about −1 to about −290, about −1 to about −280, about −1 to about −270, about −1 to about −260, about −1 to about −250, about −1 to about −240, about −1 to about −230, about −1 to about −220, about −1 to about −210, about −1 to about −200, about −1 to about −190, about −1 to about −180, about −1 to about −170, about −1 to about −160, about −1 to about −150, about −1 to about −140, about −1 to about −130, about −1 to about −120, about −1 to about −110, about −1 to about −100, about −1 to about −90, about −1 to about −80, about −1 to about −70, about −1 to about −60, about −1 to about −50, about −1 to about −40, about −1 to about −30, or about −1 to about −20 relative to 3′ splice site of the included exon. In some aspects, the ASOs are complementary to a targeted portion that is within the region from about −1 to about −100, from about −100 to about −200, from about −200 to about −300, from about −300 to about −400, or from about −400 to about −500 relative to 3′ splice site of the included exon.

[0245] In some embodiments, the ASOs are complementary to a targeted region of an OPA1 pre-mRNA, e.g., an OPA1 NMD exon-containing pre-mRNA, that is downstream (in the 3′ direction) of the 3′ splice site (5′ end) of the included exon in an OPA1 pre-mRNA, e.g., an OPA1 NMD exon-containing pre-mRNA (e.g., in the direction designated by positive numbers). In some embodiments, the ASOs are complementary to a targeted portion of the OPA1 pre-mRNA that is within the region of about +1 to about +40,000 relative to the 3′ splice site of the included exon. In some aspects, the ASOs are complementary to a targeted portion that is within the region about +1 to about +40,000, about +1 to about +30,000, about +1 to about +20,000, about +1 to about +15,000, about +1 to about +10,000, about +1 to about +5,000, about +1 to about +4,000, about +1 to about +3,000, about +1 to about +2,000, about +1 to about +1,000, about +1 to about +500, about +1 to about +490, about +1 to about +480, about +1 to about +470, about +1 to about +460, about +1 to about +450, about +1 to about +440, about +1 to about +430, about +1 to about +420, about +1 to about +410, about +1 to about +400, about +1 to about +390, about +1 to about +380, about +1 to about +370, about +1 to about +360, about +1 to about +350, about +1 to about +340, about +1 to about +330, about +1 to about +320, about +1 to about +310, about +1 to about +300, about +1 to about +290, about +1 to about +280, about +1 to about +270, about +1 to about +260, about +1 to about +250, about +1 to about +240, about +1 to about +230, about +1 to about +220, about +1 to about +210, about +1 to about +200, about +1 to about +190, about +1 to about +180, about +1 to about +170, about +1 to about +160, about +1 to about +150, about +1 to about +140, about +1 to about +130, about +1 to about +120, about +1 to about +110, about +1 to about +100, about +1 to about +90, about +1 to about +80, about +1 to about +70, about +1 to about +60, about +1 to about +50, about +1 to about +40, about +1 to about +30, or about +1 to about +20, or about +1 to about +10 relative to 3′ splice site of the included exon.

[0246] In some embodiments, the targeted portion of the OPA1 pre-mRNA, e.g., the OPA1 NMD exon-containing pre-mRNA, is within the region +100 relative to the 5′ splice site (3′ end) of the included exon to −100 relative to the 3′ splice site (5′ end) of the included exon. In some embodiments, the targeted portion of the OPA1 NMD exon-containing pre-mRNA is within the NMD exon. In some embodiments, the target portion of the OPA1 NMD exon-containing pre-mRNA comprises a pseudo-exon and intron boundary.

[0247] The ASOs may be of any length suitable for specific binding and effective enhancement of splicing. In some embodiments, the ASOs consist of 8 to 50 nucleobases. For example, the ASO may be 8, 9, 10, 11, 12, 13, 14, 15, 16, 17, 18, 19, 20, 21, 22, 23, 24, 25, 26, 27, 28, 29, 30, 31, 32, 33, 34, 35, 40, 45, or 50 nucleobases in length. In some embodiments, the ASOs consist of more than 50 nucleobases. In some embodiments, the ASO is from 8 to 50 nucleobases, 8 to 40 nucleobases, 8 to 35 nucleobases, 8 to 30 nucleobases, 8 to 25 nucleobases, 8 to 20 nucleobases, 8 to 15 nucleobases, 9 to 50 nucleobases, 9 to 40 nucleobases, 9 to 35 nucleobases, 9 to 30 nucleobases, 9 to 25 nucleobases, 9 to 20 nucleobases, 9 to 15 nucleobases, 10 to 50 nucleobases, 10 to 40 nucleobases, 10 to 35 nucleobases, 10 to 30 nucleobases, 10 to 25 nucleobases, 10 to 20 nucleobases, 10 to 15 nucleobases, 11 to 50 nucleobases, 11 to 40 nucleobases, 11 to 35 nucleobases, 11 to 30 nucleobases, 11 to 25 nucleobases, 11 to 20 nucleobases, 11 to 15 nucleobases, 12 to 50 nucleobases, 12 to 40 nucleobases, 12 to 35 nucleobases, 12 to 30 nucleobases, 12 to 25 nucleobases, 12 to 20 nucleobases, 12 to 15 nucleobases, 13 to 50 nucleobases, 13 to 40 nucleobases, 13 to 35 nucleobases, 13 to 30 nucleobases, 13 to 25 nucleobases, 13 to 20 nucleobases, 14 to 50 nucleobases, 14 to 40 nucleobases, 14 to 35 nucleobases, 14 to 30 nucleobases, 14 to 25 nucleobases, 14 to 20 nucleobases, 15 to 50 nucleobases, 15 to 40 nucleobases, 15 to 35 nucleobases, 15 to 30 nucleobases, 15 to 25 nucleobases, 15 to 20 nucleobases, 20 to 50 nucleobases, 20 to 40 nucleobases, 20 to 35 nucleobases, 20 to 30 nucleobases, 20 to 25 nucleobases, 25 to 50 nucleobases, 25 to 40 nucleobases, 25 to 35 nucleobases, or 25 to 30 nucleobases in length. In some embodiments, the ASOs are 18 nucleotides in length. In some embodiments, the ASOs are 15 nucleotides in length. In some embodiments, the ASOs are 25 nucleotides in length.

[0248] In some embodiments, two or more ASOs with different chemistries but complementary to the same targeted portion of the processed mRNA or the pre-mRNA are used. In some embodiments, two or more ASOs that are complementary to different targeted portions of the processed mRNA or the pre-mRNA are used.

[0249] In some embodiments, the antisense oligonucleotides of the disclosure are chemically linked to one or more moieties or conjugates, e.g., a targeting moiety or other conjugate that enhances the activity or cellular uptake of the oligonucleotide. Such moieties include, but are not limited to, a lipid moiety, e.g., as a cholesterol moiety, a cholesteryl moiety, an aliphatic chain, e.g., dodecandiol or undecyl residues, a polyamine or a polyethylene glycol chain, or adamantane acetic acid. Oligonucleotides comprising lipophilic moieties and preparation methods have been described in the published literature. In embodiments, the antisense oligonucleotide is conjugated with a moiety including, but not limited to, an abasic nucleotide, a polyether, a polyamine, a polyamide, a peptides, a carbohydrate, e.g., N-acetylgalactosamine (GalNAc), N-Ac-Glucosamine (GluNAc), or mannose (e.g., mannose-6-phosphate), a lipid, or a polyhydrocarbon compound. Conjugates can be linked to one or more of any nucleotides comprising the antisense oligonucleotide at any of several positions on the sugar, base or phosphate group, as understood in the art and described in the literature, e.g., using a linker. Linkers can include a bivalent or trivalent branched linker. In embodiments, the conjugate is attached to the 3′ end of the antisense oligonucleotide. Methods of preparing oligonucleotide conjugates are described, e.g., in U.S. Pat. No. 8,450,467, “Carbohydrate conjugates as delivery agents for oligonucleotides,” incorporated by reference herein.

[0250] In some embodiments, an agent disclosed herein comprises a cell-penetrating peptide conjugated to an antisense oligomer, e.g., an ASO disclosed herein. The terms “cell-penetrating peptide” or “CPP” are used interchangeably and can refer to cationic cell-penetrating peptides, also called transport peptides, carrier peptides, or peptide transduction domains. The peptides can have the capability of inducing cell penetration within at least 70%, 80%, 90%, or 95%, or 100% of cells of a given cell culture population and allow macromolecular translocation within multiple tissues in vivo upon systemic administration. Non-limiting examples of the cell-penetrating peptide that can be used in an agent disclosed herein are listed in Table 9. The synthesis, structures, and delivery characteristics of morpholino oligomers are detailed in U.S. Patent Publication No. US 2010/0016215, and Jearawiriyapaisarn et al. (2008), Mol Ther. 2008 September; 16(9): 1624-1629, both of which are incorporated herein in their entireties.

[0251] In some embodiments, the agent disclosed herein comprises a cell-penetrating peptide conjugated to a phosphoramidate morpholino oligomer, wherein the phosphoramidate morpholino oligomer has the sequence of any of the ASOs disclosed herein. The terms “morpholino oligomer” or “PMO” (phosphoramidate- or phosphorodiamidate morpholino oligomer) refer to an oligonucleotide composed of morpholino subunit structures, where (i) the structures are linked together by phosphorus-containing linkages, one to three atoms long, preferably two atoms long, and preferably uncharged or cationic, joining the morpholino nitrogen of one subunit to a 5′ exocyclic carbon of an adjacent subunit, and (ii) each morpholino ring bears a purine or pyrimidine base-pairing moiety effective to bind, by base specific hydrogen bonding, to a base in a polynucleotide. Variations can be made to the phosphorodiamidate linkage as long as they do not interfere with binding or activity. For example, the oxygen attached to phosphorus may be substituted with sulfur (thiophosphorodiamidate). The 5′ oxygen may be substituted with amino or lower alkyl substituted amino. The pendant nitrogen attached to phosphorus may be unsubstituted, monosubstituted, or disubstituted with (optionally substituted) lower alkyl. See also the discussion of cationic linkages below. The purine or pyrimidine base pairing moiety is typically adenine, cytosine, guanine, uracil, thymine or inosine. The synthesis, structures, and binding characteristics of morpholino oligomers are detailed in U.S. Pat. Nos. 5,698,685, 5,217,866, 5,142,047, 5,034,506, 5,166,315, 5,521,063, and 5,506,337, and PCT Publication. No. WO 2008036127, all of which are incorporated herein by reference.

[0252] In some embodiments, the nucleic acid to be targeted by an ASO is an OPA1 processed mRNA in a cell. In some embodiments, the nucleic acid to be targeted by an ASO is an OPA1 pre-mRNA, e.g., NMD exon-containing pre-mRNA expressed in a cell, such as a eukaryotic cell. In some embodiments, the term “cell” may refer to a population of cells. In some embodiments, the cell is in a subject. In some embodiments, the cell is isolated from a subject. In some embodiments, the cell is ex vivo. In some embodiments, the cell is a condition or disease-relevant cell or a cell line. In some embodiments, the cell is in vitro (e.g., in cell culture).

### Pharmaceutical Compositions

[0253] Pharmaceutical compositions or formulations comprising the agent, e.g., antisense oligonucleotide, of the described compositions and for use in any of the described methods can be prepared according to conventional techniques well known in the pharmaceutical industry and described in the published literature. In embodiments, a pharmaceutical composition or formulation for treating a subject comprises an effective amount of any antisense oligomer as described herein, or a pharmaceutically acceptable salt, solvate, hydrate or ester thereof. The pharmaceutical formulation comprising an antisense oligomer may further comprise a pharmaceutically acceptable excipient, diluent or carrier.

[0254] Pharmaceutically acceptable salts are suitable for use in contact with the tissues of humans and lower animals without undue toxicity, irritation, allergic response, etc., and are commensurate with a reasonable benefit/risk ratio. (See, e.g., S. M. Berge, et al., J. Pharmaceutical Sciences, 66: 1-19 (1977), incorporated herein by reference for this purpose. The salts can be prepared in situ during the final isolation and purification of the compounds, or separately by reacting the free base form with a suitable organic acid. Examples of pharmaceutically acceptable, nontoxic acid addition salts are salts of an amino group formed with inorganic acids such as hydrochloric acid, hydrobromic acid, phosphoric acid, sulfuric acid and perchloric acid or with organic acids such as acetic acid, oxalic acid, maleic acid, tartaric acid, citric acid, succinic acid or malonic acid or by using other documented methodologies such as ion exchange. Other pharmaceutically acceptable salts include adipate, alginate, ascorbate, aspartate, benzenesulfonate, benzoate, bisulfate, borate, butyrate, camphorate, camphorsulfonate, citrate, cyclopentanepropionate, digluconate, dodecylsulfate, ethanesulfonate, formate, fumarate, glucoheptonate, glycerophosphate, gluconate, hemisulfate, heptanoate, hexanoate, hydroiodide, 2-hydroxy-ethanesulfonate, lactobionate, lactate, laurate, lauryl sulfate, malate, maleate, malonate, methanesulfonate, 2-naphthalenesulfonate, nicotinate, nitrate, oleate, oxalate, palmitate, pamoate, pectinate, persulfate, 3-phenylpropionate, phosphate, picrate, pivalate, propionate, stearate, succinate, sulfate, tartrate, thiocyanate, p-toluenesulfonate, undecanoate, valerate salts, and the like. Representative alkali or alkaline earth metal salts include sodium, lithium, potassium, calcium, magnesium, and the like. Further pharmaceutically acceptable salts include, when appropriate, nontoxic ammonium, quaternary ammonium, and amine cations formed using counterions such as halide, hydroxide, carboxylate, sulfate, phosphate, nitrate, loweralkyl sulfonate and aryl sulfonate.

[0255] In some embodiments, the compositions are formulated into any of many possible dosage forms such as, but not limited to, tablets, capsules, gel capsules, liquid syrups, soft gels, suppositories, and enemas. In embodiments, the compositions are formulated as suspensions in aqueous, non-aqueous or mixed media. Aqueous suspensions may further contain substances that increase the viscosity of the suspension including, for example, sodium carboxymethylcellulose, sorbitol and/or dextran. The suspension may also contain stabilizers. In embodiments, a pharmaceutical formulation or composition of the present disclosure includes, but is not limited to, a solution, emulsion, microemulsion, foam or liposome-containing formulation (e.g., cationic or noncationic liposomes).

[0256] The pharmaceutical composition or formulation described herein may comprise one or more penetration enhancers, carriers, excipients or other active or inactive ingredients as appropriate and well known to those of skill in the art or described in the published literature. In embodiments, liposomes also include sterically stabilized liposomes, e.g., liposomes comprising one or more specialized lipids. These specialized lipids result in liposomes with enhanced circulation lifetimes. In embodiments, a sterically stabilized liposome comprises one or more glycolipids or is derivatized with one or more hydrophilic polymers, such as a polyethylene glycol (PEG) moiety. In some embodiments, a surfactant is included in the pharmaceutical formulation or compositions. The use of surfactants in drug products, formulations and emulsions is well known in the art. In embodiments, the present disclosure employs a penetration enhancer to effect the efficient delivery of the antisense oligonucleotide, e.g., to aid diffusion across cell membranes and/or enhance the permeability of a lipophilic drug. In some embodiments, the penetration enhancers are a surfactant, fatty acid, bile salt, chelating agent, or non-chelating nonsurfactant.

[0257] In some embodiments, the pharmaceutical formulation comprises multiple antisense oligonucleotides. In embodiments, the antisense oligonucleotide is administered in combination with another drug or therapeutic agent.

### Combination Therapies

[0258] In some aspects, provided herein are methods, compositions, and kits relating to a combination therapy. In some embodiments, a combination therapy disclosed herein involves utilizes an agent that modulates a translation regulatory element of a processed mRNA that encoding a target protein, e.g., OPA1 protein, and an agent that modulates splicing of a pre-mRNA that is transcribed from a gene that encodes the target protein, e.g., OPA1 gene. In some aspects, provided herein are compositions, methods, and kits relating to a combination therapy that utilizes an agent that target at least a portion of the 5′ UTR of a processed mRNA that encoding a target protein, e.g., OPA1 protein, and an agent that modulates splicing of a pre-mRNA that is transcribed from a gene that encodes the target protein, e.g., OPA1 gene.

[0259] In some cases, provided herein is a method of increasing expression of a target protein in a cell having a processed mRNA that encodes the target protein and comprises a translation regulatory element that inhibits translation of the processed mRNA, the method comprising delivering into the cell: (1) a first agent or a first nucleic acid sequence encoding the first agent, and (2) a second agent or a second nucleic acid sequence encoding the second agent, wherein the first agent modulates splicing of a pre-mRNA that is transcribed from an target gene that encodes the target protein, and wherein the second agent modulates a structure of the translation regulatory element of the processed mRNA that encodes the target protein, thereby increasing the expression of the target protein in the cell. In some embodiments, provided herein is a method of treatment that comprising administering to a subject in need thereof (1) a first agent or a first nucleic acid sequence encoding the first agent, and (2) a second agent or a second nucleic acid sequence encoding the second agent, wherein the first agent modulates splicing of a pre-mRNA that is transcribed from an target gene that encodes the target protein, and wherein the second agent modulates a structure of the translation regulatory element of the processed mRNA that encodes the target protein, thereby increasing the expression of the target protein in the cells of the subject.

[0260] In some cases, provided herein is a method of increasing expression of a target protein in a cell having a processed mRNA that encodes the target protein and comprises a translation regulatory element that inhibits translation of the processed mRNA, the method comprising delivering into the cell: (1) a first agent or a first nucleic acid sequence encoding the first agent, and (2) a second agent or a second nucleic acid sequence encoding the second agent, wherein the first agent modulates splicing of a pre-mRNA that is transcribed from an target gene that encodes the target protein, and wherein the second agent (a) binds to a targeted portion of the processed mRNA; (b) modulates interaction of the translation regulatory element with a factor involved in translation of the processed mRNA; or (c) a combination of (a) and (b), thereby increasing the expression of the target protein in the cell. In some embodiments, provided herein is a method of treatment that comprising administering to a subject in need thereof (1) a first agent or a first nucleic acid sequence encoding the first agent, and (2) a second agent or a second nucleic acid sequence encoding the second agent, wherein the first agent modulates splicing of a pre-mRNA that is transcribed from an target gene that encodes the target protein, and wherein the second agent (a) binds to a targeted portion of the processed mRNA; (b) modulates interaction of the translation regulatory element with a factor involved in translation of the processed mRNA; or (c) a combination of (a) and (b), thereby increasing the expression of the target protein in the cells of the subject.

[0261] In some embodiments, provided herein is a method of modulating expression of a target protein in a cell, wherein contacting to the cell: (1) a first agent or a first nucleic acid sequence encoding the first agent, and (2) a second agent or a second nucleic acid sequence encoding the second agent, wherein the first agent comprises a first antisense oligomer with at least 80% sequence identity to a sequence selected from the group consisting of SEQ ID NOs: 6-275 and 280-299, and the second agent comprises a second antisense oligomer that binds to 5′ UTR of a processed mRNA that encodes the target protein, and wherein the target protein is an OPA1 protein. In some cases, provided herein is a method of treatment that comprising administering to a subject in need thereof (1) a first agent or a first nucleic acid sequence encoding the first agent, and (2) a second agent or a second nucleic acid sequence encoding the second agent, wherein the first agent comprises a first antisense oligomer with at least 80% sequence identity to a sequence selected from the group consisting of SEQ ID NOs: 6-275 and 280-299, and the second agent comprises a second antisense oligomer that binds to 5′ UTR of a processed mRNA that encodes the target protein, and wherein the target protein is an OPA1 protein.

[0262] In some aspects, provided herein is a pharmaceutical composition, comprising (1) a first therapeutic agent or a first nucleic acid sequence encoding the first therapeutic agent, and (2) a second therapeutic agent or a second nucleic acid sequence encoding the second therapeutic agent, wherein the first therapeutic agent comprises a first antisense oligomer with at least 80% sequence identity to a sequence selected from the group consisting of SEQ ID NOs: 6-275 and 280-299, and the second therapeutic agent comprises a second antisense oligomer that binds to 5′ UTR of a processed mRNA that encodes an OPA1 protein.

[0263] In some aspects, provided herein is a pharmaceutical composition, comprising: (1) a first therapeutic agent or a first nucleic acid sequence encoding the first therapeutic agent, (2) a second therapeutic agent or a second nucleic acid sequence encoding the second therapeutic agent, and (3) a pharmaceutically acceptable carrier or excipient, wherein the first therapeutic agent modulates splicing of a pre-mRNA that is transcribed from a target gene that encodes the target protein, and wherein the second therapeutic agent (a) binds to a targeted portion of a processed mRNA that encodes an OPA1 protein and that comprises a translation regulatory element; (b) modulates interaction of the translation regulatory element with a factor involved in translation of the processed mRNA; or (c) a combination of (a) and (b), and wherein the translation regulatory element inhibits translation of the processed mRNA.

[0264] In some aspects, provided herein is a pharmaceutical composition, comprising: (1) a first therapeutic agent or a first nucleic acid sequence encoding the first therapeutic agent, (2) a second therapeutic agent or a second nucleic acid sequence encoding the second therapeutic agent, and (3) a pharmaceutically acceptable carrier or excipient, wherein the first therapeutic agent modulates splicing of a pre-mRNA that is transcribed from a target gene that encodes the target protein, and wherein the second therapeutic agent modulates a structure of a translation regulatory element of a processed mRNA that encodes the target protein, wherein the translation regulatory element inhibits translation of the processed mRNA.

[0265] In some of these cases, the first antisense oligomer has at least 80%, 90%, or 100% sequence identity to a sequence selected from the group consisting of SEQ ID NOs: 36, 236, 242, 250, 280-283, 288, and 290-292. In some of these cases, the first antisense oligomer has at least 80%, 90%, or 100% sequence identity to a sequence selected from the group consisting of SEQ ID NOs: 227-242, 250, 280-283, 288, and 290-292. In some of these the first antisense oligomer has at least 80%, 90%, or 100% sequence identity to SEQ ID NO: 267. In some of these the first antisense oligomer has at least 80%, 90%, or 100% sequence identity to a sequence selected from the group consisting of SEQ ID NOs: 236, 242, 250, 280-283, 288, and 290-292. In some of these the second antisense oligomer has at least 80% sequence identity to a sequence selected from the group consisting of SEQ ID NOs: 608-1253. In some of these the second antisense oligomer has at least 80%, 90%, or 100% sequence identity to a sequence selected from the group consisting of SEQ ID NOs: 827-847, 932-937, 953, 968, 988-1023.

[0266] In some embodiments, the agent disclosed in the present disclosure can be used in combination with one or more additional therapeutic agents. In some embodiments, the one or more additional therapeutic agents can comprise a small molecule. For example, the one or more additional therapeutic agents can comprise a small molecule described in WO2016128343A1, WO2017053982A1, WO2016196386A1, WO201428459A1, WO201524876A2, WO2013119916A2, and WO2014209841A2, which are incorporated by reference herein in their entirety. In some embodiments, the one or more additional therapeutic agents comprise an ASO that can be used to correct intron retention.

### Treatment of Subjects

[0267] Any of the compositions provided herein may be administered to an individual. “Individual” may be used interchangeably with “subject” or “patient.” An individual may be a mammal, for example a human or animal such as a non-human primate, a rodent, a rabbit, a rat, a mouse, a horse, a donkey, a goat, a cat, a dog, a cow, a pig, or a sheep. In embodiments, the individual is a human. In embodiments, the individual is a fetus, an embryo, or a child. In other embodiments, the individual may be another eukaryotic organism, such as a plant. In some embodiments, the compositions provided herein are administered to a cell ex vivo.

[0268] In some embodiments, the compositions provided herein are administered to an individual as a method of treating a disease or disorder. In some embodiments, the individual has a genetic disease, such as any of the diseases described herein. In some embodiments, the individual is at risk of having a disease, such as any of the diseases described herein. In some embodiments, the individual is at increased risk of having a disease or disorder caused by insufficient amount of a protein or insufficient activity of a protein. If an individual is “at an increased risk” of having a disease or disorder caused insufficient amount of a protein or insufficient activity of a protein, the method involves preventative or prophylactic treatment. For example, an individual may be at an increased risk of having such a disease or disorder because of family history of the disease. Typically, individuals at an increased risk of having such a disease or disorder benefit from prophylactic treatment (e.g., by preventing or delaying the onset or progression of the disease or disorder). In embodiments, a fetus is treated in utero, e.g., by administering the ASO composition to the fetus directly or indirectly (e.g., via the mother).

[0269] In some cases, the subject pharmaceutical composition and method are applicable for treatment of a condition or disease associated with OPA1 deficiency. In some cases, the subject pharmaceutical composition and method are applicable for treatment of an eye disease or condition. In some cases, the subject pharmaceutical composition and method are applicable for treatment of Optic atrophy type 1, autosomal dominant optic atrophy (ADOA), ADOA-plus syndrome; a mitochondrial disorder; glaucoma; normal tension glaucoma; Charcot-Marie-Tooth disease; mitochondria dysfunction; diabetic retinopathy; age-related macular degeneration; retinal ganglion cell death; mitochondrial fission-mediated mitochondrial dysfunction; progressive external ophthalmoplegia; deafness; ataxia; motor neuropathy; sensory neuropathy; myopathy; Behr syndrome; brain dysfunction; encephalopathy; peripheral neuropathy; fatal infantile mitochondrial encephalomyopathy; hypertrophic cardiomyopathy; spastic ataxic syndrome; sensory motor peripheral neuropathy; hypotonia; gastrointestinal dysmotility and dysphagia; optic atrophy; optic atrophy plus syndrome; Mitochondrial DNA depletion syndrome 14; late-onset cardiomyopathy; diabetic cardiomyopathy; Alzheimer's Disease; focal segmental glomerulosclerosis; kidney disease; Huntington's Disease; cognitive function decline in healthy aging; Prion diseases; late onset dementia and parkinsonism; mitochondrial myopathy; Leigh syndrome; Friedreich's ataxia; Parkinson's disease; MELAS (Mitochondrial encephalomyopathy, lactic acidosis, and stroke-like episodes); pyruvate dehydrogenase complex deficiency; chronic kidney disease; Leber's hereditary optic neuropathy; obesity; age-related systemic neurodegeneration; skeletal muscle atrophy; heart and brain ischemic damage; massive liver apoptosis; NARP (neuropathy, ataxia, retinitis pigmentosa); MERRF (myoclonic epilepsy and ragged red fibers); Pearsons/Kems-Sayre syndrome; MIDD (maternally inherited diabetes and deafness); mitochondrial trifunctional protein deficiency; Fuchs corneal endothelial dystrophy; macular telangiectasia; retinitis pigmentosa; Leber congenital amaurosis; inherited maculopathy; Stargardt disease; or Sorsby fundus dystrophy.

[0270] In some embodiments, the compositions and methods provided herein are applicable for treatment of mitochondrial disorders, for instance, alleviation of one or more optic symptoms of a primary mitochondrial disorder. In some cases, the compositions and methods provided herein are applicable for treatment of optic neuropathies (e.g., DOA or dominant optic atrophy, LHON or Leber hereditary optic neuropathy), CPEO (chronic progressive external ophthalmoplegia), or pigmentary retinopathy (e.g., NARP (neuropathy, ataxia, retinitis pigmentosa), MELAS (mitochondrial encephalopathy, lactic acidosis and stroke like episodes), MERRF (myoclonic epilepsy and ragged red fibers), Leigh syndrome, Pearsons/Kems-Sayre syndrome, MIDD (maternally inherited diabetes and deafness), or mitochondrial trifunctional protein deficiency).

[0271] In some embodiments, the compositions and methods provided herein are applicable for treatment of age-related ophthalmic diseases with associated mitochondrial dysfunction, such as Glaucoma, age-related macular degeneration, diabetic retinopathy, Fuchs corneal endothelial dystrophy, or Macular telangiectasia.

[0272] In some embodiments, the compositions and methods provided herein are applicable for treatment of hereditary ophthalmic diseases with associated mitochondrial dysfunction, such as, Retinitis pigmentosa (e.g., CERKL retinitis pigmentosa), Leber congenital amaurosis, or Inherited maculopathies (e.g., Stargardt's disease or Sorsby's fundus dystrophy).

[0273] Autosomal dominant optic atrophy (ADOA) is the most common inherited optic nerve disorder and is characterized by retinal ganglion cell loss. In some cases, 65-90% of ADOA cases are caused by mutations in one allele of the OPA1 gene. OPA1 gene encodes an OPA1 protein that is a mitochondrial GTPase, which can have a critical maintenance role in mitochondria structure and function. Most OPA1 mutations can lead to a haploinsufficiency, resulting in about a 50% decrease of normal OPA1 protein levels. Approximately 1 out of 30,000 people are affected globally with a higher incidence of ˜1 out of 10,000 in Denmark due to a founder effect. ADOA can present within the first decade of life. 80% of ADOA patients are symptomatic before 10 years of age. The disease can cause progressive and irreversible vision loss and up to 46% of patients are registered as legally blind.

[0274] In some cases, a therapeutic agent comprises an oligonucleotide. In some cases, a therapeutic agent comprises a vector, e.g., a viral vector, expressing an oligonucleotide that binds to the targeted region of a pre-mRNA the encodes the target peptide sequence. The methods provided herein can be adapted to contacting a vector that encodes an agent, e.g., an oligonucleotide, to a cell, so that the agent binds to a pre-mRNA in the cell and modulates the processing of the pre-mRNA. In some cases, the viral vector comprises an adenoviral vector, adeno-associated viral (AAV) vector, lentiviral vector, Herpes Simplex Virus (HSV) viral vector, retroviral vector, or any applicable viral vector. In some cases, a therapeutic agent comprises a gene editing tool that is configured to modify a gene encoding the target peptide sequence such that a gene region that encodes the inefficient translation region is deleted. In some cases, a gene editing tool comprises vector, e.g., viral vector, for gene editing based on CRISPR-Cas9, TALEN, Zinc Finger, or other applicable technologies.

[0275] Suitable routes for administration of ASOs of the present disclosure may vary depending on cell type to which delivery of the ASOs is desired. Multiple tissues and organs are affected by ADOA, with the eye being the most significantly affected tissue. The ASOs of the present disclosure may be administered to patients parenterally, for example, by intravitreal injection, intrathecal injection, intracerebroventricular injection, intraperitoneal injection, intramuscular injection, subcutaneous injection, or intravenous injection.

[0276] In embodiments, the antisense oligonucleotide is administered with one or more agents capable of promoting penetration of the subject antisense oligonucleotide across the blood-brain barrier by any method known in the art. For example, delivery of agents by administration of an adenovirus vector to motor neurons in muscle tissue is described in U.S. Pat. No. 6,632,427, “Adenoviral-vector-mediated gene transfer into medullary motor neurons,” incorporated herein by reference. Delivery of vectors directly to the brain, e.g., the striatum, the thalamus, the hippocampus, or the substantia nigra, is described, e.g., in U.S. Pat. No. 6,756,523, “Adenovirus vectors for the transfer of foreign genes into cells of the central nervous system particularly in brain,” incorporated herein by reference.

[0277] In some embodiments, the antisense oligonucleotides are linked or conjugated with agents that provide desirable pharmaceutical or pharmacodynamic properties. In embodiments, the antisense oligonucleotide is coupled to a substance, known in the art to promote penetration or transport across the blood-brain barrier, e.g., an antibody to the transferrin receptor. In embodiments, the antisense oligonucleotide is linked with a viral vector, e.g., to render the antisense compound more effective or increase transport across the blood-brain barrier. In embodiments, osmotic blood brain barrier disruption is assisted by infusion of sugars, e.g., meso erythritol, xylitol, D(+) galactose, D(+) lactose, D(+) xylose, dulcitol, myo-inositol, L(−) fructose, D(−) mannitol, D(+) glucose, D(+) arabinose, D(−) arabinose, cellobiose, D(+) maltose, D(+) raffinose, L(+) rhamnose, D(+) melibiose, D(−) ribose, adonitol, D(+) arabitol, L(−) arabitol, D(+) fucose, L(−) fucose, D(−) lyxose, L(+) lyxose, and L(−) lyxose, or amino acids, e.g., glutamine, lysine, arginine, asparagine, aspartic acid, cysteine, glutamic acid, glycine, histidine, leucine, methionine, phenylalanine, proline, serine, threonine, tyrosine, valine, and taurine. Methods and materials for enhancing blood brain barrier penetration are described, e.g., in U.S. Pat. No. 9,193,969, “Compositions and methods for selective delivery of oligonucleotide molecules to specific neuron types,” U.S. Pat. No. 4,866,042, “Method for the delivery of genetic material across the blood brain barrier,” U.S. Pat. No. 6,294,520, “Material for passage through the blood-brain barrier,” and U.S. Pat. No. 6,936,589, “Parenteral delivery systems,” each incorporated herein by reference.

[0278] In some embodiments, subjects treated using the methods and compositions are evaluated for improvement in condition using any methods known and described in the art.

Methods of Identifying Additional ASOs that Induce Exon Skipping

[0279] Also within the scope of the present disclosure are methods for identifying or determining ASOs that induce exon skipping of an OPA1 NMD exon-containing pre-mRNA. For example, a method can comprise identifying or determining ASOs that induce pseudo-exon skipping of an OPA1 NMD exon-containing pre-mRNA. ASOs that specifically hybridize to different nucleotides within the target region of the pre-mRNA may be screened to identify or determine ASOs that improve the rate and/or extent of splicing of the target intron. In some embodiments, the ASO may block or interfere with the binding site(s) of a splicing repressor(s)/silencer. Any method known in the art may be used to identify (determine) an ASO that when hybridized to the target region of the exon results in the desired effect (e.g., pseudo-exon skipping, protein or functional RNA production). These methods also can be used for identifying ASOs that induce exon skipping of the included exon by binding to a targeted region in an intron flanking the included exon, or in a non-included exon. An example of a method that may be used is provided below.

[0280] A round of screening, referred to as an ASO “walk” may be performed using ASOs that have been designed to hybridize to a target region of a pre-mRNA. For example, the ASOs used in the ASO walk can be tiled every 5 nucleotides from approximately 100 nucleotides upstream of the 3′ splice site of the included exon (e.g., a portion of sequence of the exon located upstream of the target/included exon) to approximately 100 nucleotides downstream of the 3′ splice site of the target/included exon and/or from approximately 100 nucleotides upstream of the 5′ splice site of the included exon to approximately 100 nucleotides downstream of the 5′ splice site of the target/included exon (e.g., a portion of sequence of the exon located downstream of the target/included exon). For example, a first ASO of 15 nucleotides in length may be designed to specifically hybridize to nucleotides +6 to +20 relative to the 3′ splice site of the target/included exon. A second ASO may be designed to specifically hybridize to nucleotides +11 to +25 relative to the 3′ splice site of the target/included exon. ASOs are designed as such spanning the target region of the pre-mRNA. In embodiments, the ASOs can be tiled more closely, e.g., every 1, 2, 3, or 4 nucleotides. Further, the ASOs can be tiled from 100 nucleotides downstream of the 5′ splice site, to 100 nucleotides upstream of the 3′ splice site. In some embodiments, the ASOs can be tiled from about 1,160 nucleotides upstream of the 3′ splice site, to about 500 nucleotides downstream of the 5′ splice site. In some embodiments, the ASOs can be tiled from about 500 nucleotides upstream of the 3′ splice site, to about 1,920 nucleotides downstream of the 3′ splice site.

[0281] One or more ASOs, or a control ASO (an ASO with a scrambled sequence, sequence that is not expected to hybridize to the target region) are delivered, for example by transfection, into a disease-relevant cell line that expresses the target pre-mRNA (e.g., a NMD exon-containing pre-mRNA described herein). The exon skipping effects of each of the ASOs may be assessed by any method known in the art, for example by reverse transcriptase (RT)-PCR using primers that span the splice junction, as described in Example 2.4. A reduction or absence of a longer RT-PCR product produced using the primers spanning the region containing the included exon (e.g., including the flanking exons of the NMD exon) in ASO-treated cells as compared to in control ASO-treated cells indicates that splicing of the target NMD exon has been enhanced. In some embodiments, the exon skipping efficiency (or the splicing efficiency to splice the intron containing the NMD exon), the ratio of spliced to unspliced pre-mRNA, the rate of splicing, or the extent of splicing may be improved using the ASOs described herein. The amount of protein or functional RNA that is encoded by the target pre-mRNA can also be assessed to determine whether each ASO achieved the desired effect (e.g., enhanced functional protein production). Any method known in the art for assessing and/or quantifying protein production, such as Western blotting, flow cytometry, immunofluorescence microscopy, and ELISA, can be used.

[0282] A second round of screening, referred to as an ASO “micro-walk” may be performed using ASOs that have been designed to hybridize to a target region of a pre-mRNA. The ASOs used in the ASO micro-walk are tiled every 1 nucleotide to further refine the nucleotide acid sequence of the pre-mRNA that when hybridized with an ASO results in exon skipping (or enhanced splicing of NMD exon).

[0283] Regions defined by ASOs that promote splicing of the target intron are explored in greater detail by means of an ASO “micro-walk”, involving ASOs spaced in 1-nt steps, as well as longer ASOs, typically 18-25 nt.

[0284] As described for the ASO walk above, the ASO micro-walk is performed by delivering one or more ASOs, or a control ASO (an ASO with a scrambled sequence, sequence that is not expected to hybridize to the target region), for example by transfection, into a disease-relevant cell line that expresses the target pre-mRNA. The splicing-inducing effects of each of the ASOs may be assessed by any method known in the art, for example by reverse transcriptase (RT)-PCR using primers that span the NMD exon, as described herein (see, e.g., Example 2.4). A reduction or absence of a longer RT-PCR product produced using the primers spanning the NMD exon in ASO-treated cells as compared to in control ASO-treated cells indicates that exon skipping (or splicing of the target intron containing an NMD exon) has been enhanced. In some embodiments, the exon skipping efficiency (or the splicing efficiency to splice the intron containing the NMD exon), the ratio of spliced to unspliced pre-mRNA, the rate of splicing, or the extent of splicing may be improved using the ASOs described herein. The amount of protein or functional RNA that is encoded by the target pre-mRNA can also be assessed to determine whether each ASO achieved the desired effect (e.g., enhanced functional protein production). Any method known in the art for assessing and/or quantifying protein production, such as Western blotting, flow cytometry, immunofluorescence microscopy, and ELISA, can be used.

[0285] ASOs that when hybridized to a region of a pre-mRNA result in exon skipping (or enhanced splicing of the intron containing a NMD exon) and increased protein production may be tested in vivo using animal models, for example transgenic mouse models in which the full-length human gene has been knocked-in or in humanized mouse models of disease. Suitable routes for administration of ASOs may vary depending on the disease and/or the cell types to which delivery of the ASOs is desired. ASOs may be administered, for example, by intravitreal injection, intrathecal injection, intracerebroventricular injection, intraperitoneal injection, intramuscular injection, subcutaneous injection, or intravenous injection. Following administration, the cells, tissues, and/or organs of the model animals may be assessed to determine the effect of the ASO treatment by for example evaluating splicing (e.g., efficiency, rate, extent) and protein production by methods known in the art and described herein. The animal models may also be any phenotypic or behavioral indication of the disease or disease severity.

[0286] Also within the scope of the present disclosure is a method to identify or validate an NMD-inducing exon in the presence of an NMD inhibitor, for example, cycloheximide. An exemplary method is provided in Example 2.2.

Methods of Identifying Additional ASOs that Modulate mRNA Translation.

[0287] Also within the scope of the present disclosure are methods for identifying or determining ASOs that modulates translation of OPA1 processed mRNA transcripts. For example, a method can comprise identifying or determining ASOs that modulate translation of OPA1 processed mRNA transcripts. ASOs that specifically hybridize to different nucleotides within the targeted portion of the processed mRNA may be screened to identify or determine ASOs that improve the rate and/or efficiency of translation of the processed mRNA. In some embodiments, the ASO may interfere interaction of one or more translation factors with the processed mRNA. Any method known in the art may be used to identify (determine) an ASO that when hybridized to the targeted portion of the processed mRNA results in the desired effect (e.g., increase in rate and/or efficiency of translation of the processed mRNA). An example of a method that may be used is provided below.

[0288] A round of screening, referred to as an ASO “walk” may be performed using ASOs that have been designed to hybridize to a targeted portion of a mRNA transcript, e.g., a processed mRNA transcript. For example, the ASOs used in the ASO walk can be tiled every 5 nucleotides from approximately 100, 200, 300, 400, or 500 nucleotides upstream of a region of interest (e.g., 5′-UTR of the processed mRNA) to approximately 100 nucleotides downstream of the region of interest. For example, a first ASO of 15 nucleotides in length may be designed to specifically hybridize to the first 15 nucleotides at the 5′ end of the processed mRNA, e.g., +1 to +15 relative to the 5′ end of Exon 1. A second ASO may be designed to specifically hybridize to nucleotides +6 to +20 relative to the 5′ end of Exon 1. ASOs are designed as such spanning the targeted portion of the mRNA transcript. In embodiments, the ASOs can be tiled more closely, e.g., every 1, 2, 3, or 4 nucleotides.

[0289] One or more ASOs, or a control ASO (an ASO with a scrambled sequence, sequence that is not expected to hybridize to the target region) are delivered, for example by transfection, into a disease-relevant cell line that expresses the target a processed mRNA (e.g., OPA processed mRNA or a processed mRNA comprising 5′-UTR of OPA1 mRNA and a sequence coding for a reporter protein). The translation modulation effects of each of the ASOs may be assessed by any method known in the art, for example by assessing the expression level of the protein encoded by the processed mRNA. In some cases, if the targeted portion involves 5′-UTR of a target processed mRNA, the translation modulation effects of the ASOs may be assessed by an assay, in which the 5′-UTR of the target processed mRNA is linked with a coding sequence for a reporter protein (such as luciferase), and the expression of the reporter protein in cells treated with the ASO or control ASO is examined, as described in Examples 1.3. An increase in the reporter protein level (e.g., luciferase expression level in the luciferase assay as illustrated in Examples 1.3) in the in ASO-treated cells as compared to in control ASO-treated cells indicates that translation of the processed mRNA has been enhanced. In some embodiments, level of the processed mRNA in the cells is monitored and the protein level is normalized by the level of the processed mRNA, so that any effect of the ASO treatment on the level of the processed mRNA may be excluded for the assessment of the effect of the ASO on the translation modulation of the processed mRNA. In some cases, in a reporter protein assay as described above, it is the level of the reporter protein in the cells being examined. Any method known in the art for assessing and/or quantifying protein production, such as Western blotting, flow cytometry, immunofluorescence microscopy, or ELISA, can be used.

[0290] A second round of screening, referred to as an ASO “micro-walk” may be performed using ASOs that have been designed to hybridize to a target region of a processed mRNA (e.g., OPA1 processed mRNA or a processed mRNA comprising 5′-UTR of OPA1 mRNA and a sequence coding for a reporter protein). The ASOs used in the ASO micro-walk are tiled every 1 nucleotide to further refine the nucleotide acid sequence of the processed mRNA that when hybridized with an ASO results in increase in rate and/or efficacy of translation of the processed mRNA.

[0291] Regions defined by ASOs that promote mRNA translation are explored in greater detail by means of an ASO “micro-walk”, involving ASOs spaced in 1-nt steps, as well as longer ASOs, typically 18-25 nt.

[0292] As described for the ASO walk above, the ASO micro-walk is performed by delivering one or more ASOs, or a control ASO (an ASO with a scrambled sequence, sequence that is not expected to hybridize to the target region), for example by transfection, into a disease-relevant cell line that expresses the target processed mRNA (e.g., OPA1 processed mRNA or a processed mRNA comprising 5′-UTR of OPA1 mRNA and a sequence coding for a reporter protein). The translation modulation effects of each of the ASOs may be assessed by any method known in the art, for example by Western blotting, Jess blotting, or bioluminescent quantification if luciferase is used as a reporter protein as described herein (see, e.g., Example 1.1).

[0293] ASOs that when hybridized to a region of a processed mRNA result in increased mRNA translation and increased protein production may be tested in vivo using animal models, for example transgenic mouse models in which the full-length human gene has been knocked-in or in humanized mouse models of disease. Suitable routes for administration of ASOs may vary depending on the disease and/or the cell types to which delivery of the ASOs is desired. ASOs may be administered, for example, by intravitreal injection, intrathecal injection, intracerebroventricular injection, intraperitoneal injection, intramuscular injection, subcutaneous injection, or intravenous injection. Following administration, the cells, tissues, and/or organs of the model animals may be assessed to determine the effect of the ASO treatment by for example evaluating splicing (e.g., efficiency, rate, extent) and protein production by methods known in the art and described herein. The animal models may also be any phenotypic or behavioral indication of the disease or disease severity.

### SPECIFIC EMBODIMENTS (A)

[0294] Embodiment A1. A method of treating Optic atrophy type 1 in a subject in need thereof, by increasing the expression of a target protein or functional RNA by a cell of the subject, wherein the cell has an mRNA that contains a nonsense-mediated RNA decay-inducing exon (NMD exon mRNA), and wherein the NMD exon mRNA encodes the target protein or functional RNA, the method comprising contacting the cell of the subject with a therapeutic agent that binds to a targeted portion of the NMD exon mRNA encoding the target protein or functional RNA, whereby the nonsense-mediated RNA decay-inducing exon is excluded from the NMD exon mRNA encoding the target protein or functional RNA, thereby increasing the level of mRNA encoding the target protein or functional RNA, and increasing the expression of the target protein or functional RNA in the cell of the subject.

[0295] Embodiment A2. The method of embodiment A1, wherein the target protein is OPA1.

[0296] Embodiment A3. A method of increasing expression of OPA1 protein by a cell having an mRNA that contains a nonsense-mediated RNA decay-inducing exon (NMD exon mRNA) and encodes OPA1 protein, the method comprising contacting the cell with an agent that binds to a targeted portion of the NMD exon mRNA encoding OPA1 protein, whereby the nonsense-mediated RNA decay-inducing exon is excluded from the NMD exon mRNA encoding OPA1 protein, thereby increasing the level of mRNA encoding OPA1 protein, and increasing the expression of OPA1 protein in the cell.

[0297] Embodiment A4. The method of any one of embodiments A1 to A3, wherein the nonsense-mediated RNA decay-inducing exon is spliced out from the NMD exon mRNA encoding the target protein or functional RNA.

[0298] Embodiment A5. The method of any one of embodiments A1 to A4, wherein the target protein does not comprise an amino acid sequence encoded by the nonsense-mediated RNA decay-inducing exon.

[0299] Embodiment A6. The method of any one of embodiments A1 to A5, wherein the target protein is a full-length target protein.

[0300] Embodiment A7. The method of any one of embodiments A1 to A6, wherein the agent is an antisense oligomer (ASO) complementary to the targeted portion of the NMD exon mRNA.

[0301] Embodiment A8. The method of any one of embodiments A1 to A7, wherein the mRNA is pre-mRNA.

[0302] Embodiment A9. The method of any one of embodiments A1 to A8, wherein the contacting comprises contacting the therapeutic agent to the mRNA, wherein the mRNA is in a nucleus of the cell.

[0303] Embodiment A10. The method of any one of embodiments A1 to A9, wherein the target protein or the functional RNA corrects a deficiency in the target protein or functional RNA in the subject.

[0304] Embodiment A11. The method of any one of embodiments A1 to A10, wherein the cells are in or from a subject with a condition caused by a deficient amount or activity of an OPA1 protein.

[0305] Embodiment A12. The method of any one of embodiments A1 to A11, wherein the deficient amount of the target protein is caused by haploinsufficiency of the target protein, wherein the subject has a first allele encoding a functional target protein, and a second allele from which the target protein is not produced, or a second allele encoding a nonfunctional target protein, and wherein the antisense oligomer binds to a targeted portion of a NMD exon mRNA transcribed from the first allele.

[0306] Embodiment A13. The method of any one of embodiments A1 to A11, wherein the subject has a condition caused by a disorder resulting from a deficiency in the amount or function of the target protein, wherein the subject has
[0307] (a) a first mutant allele from which
   [0308] (i) the target protein is produced at a reduced level compared to production from a wild-type allele,
   [0309] (ii) the target protein is produced in a form having reduced function compared to an equivalent wild-type protein, or
   [0310] (iii) the target protein is not produced, and
[0311] (b) a second mutant allele from which
   [0312] (i) the target protein is produced at a reduced level compared to production from a wild-type allele,
   [0313] (ii) the target protein is produced in a form having reduced function compared to an equivalent wild-type protein, or
   [0314] (iii) the target protein is not produced, and
[0315] wherein when the subject has a first mutant allele (a)(iii)., the second mutant allele is (b)(i) or (b)(ii) and wherein when the subject has a second mutant allele (b)(iii), the first mutant allele is (a)(i) or (a)(ii), and wherein the NMD exon mRNA is transcribed from either the first mutant allele that is (a)(i) or (a)(ii), and/or the second allele that is (b)(i) or (b)(ii).

[0316] Embodiment A14. The method of embodiment A13, wherein the target protein is produced in a form having reduced function compared to the equivalent wild-type protein.

[0317] Embodiment A15. The method of embodiment A13, wherein the target protein is produced in a form that is fully-functional compared to the equivalent wild-type protein.

[0318] Embodiment A16. The method of any one of embodiments A1 to A15, wherein the targeted portion of the NMD exon mRNA is within the nonsense-mediated RNA decay-inducing exon.

[0319] Embodiment A17. The method of any one of embodiments A1 to A15, wherein the targeted portion of the NMD exon mRNA is either upstream or downstream of the nonsense-mediated RNA decay-inducing exon.

[0320] Embodiment A18. The method of any one of embodiments A1 to A17, wherein the NMD exon mRNA comprises a sequence with at least about 80%, 85%, 90%, 95%, 97%, or 100% sequence identity to SEQ ID NO: 2 or 3.

[0321] Embodiment A19. The method of any one of embodiments A1 to A17, wherein the NMD exon mRNA is encoded by a genetic sequence with at least about 80%, 85%, 90%, 95%, 97%, or 100% sequence identity to SEQ ID NO: 1.

[0322] Embodiment A20. The method of any one of embodiments A1 to A17, wherein the targeted portion of the NMD exon mRNA comprises a sequence with at least 80%, 85%, 90%, 95%, 97%, or 100% sequence identity to a region comprising at least 8 contiguous nucleic acids of SEQ ID NO: 2 or 3.

[0323] Embodiment A21. The method of any one of embodiments A1 to A20, wherein the agent is an antisense oligomer (ASO) and wherein the ASO comprises a sequence that is at least about 80%, 85%, 90%, 95%, 97%, or 100% complementary to at least 8 contiguous nucleic acids of SEQ ID NO: 2 or 3.

[0324] Embodiment A22. The method of any one of embodiments A1 to A15, wherein the targeted portion of the NMD exon mRNA is within the nonsense-mediated RNA decay-inducing exon 6x of OPA1, exon 7x of OPA1, or exon 28x of OPAL.

[0325] Embodiment A23. The method of any one of embodiments A1 to A15, wherein the targeted portion of the NMD exon mRNA is upstream or downstream of the nonsense-mediated RNA decay-inducing exon 6x of OPA1, exon 7x of OPA1, or exon 28x of OPAL.

[0326] Embodiment A24. The method of any one of embodiments A1 to A15, wherein the targeted portion of the NMD exon mRNA comprises an exon-intron junction exon 6x of OPA1, exon 7x of OPA1, or exon 28x of OPAL.

[0327] Embodiment A25. The method of any one of embodiments A1 to A24, wherein the target protein produced is full-length protein, or wild-type protein.

[0328] Embodiment A26. The method of any one of embodiments A1 to A25, wherein the total amount of the mRNA encoding the target protein or functional RNA produced in the cell contacted with the antisense oligomer is increased about 1.1 to about 10-fold, about 1.5 to about 10-fold, about 2 to about 10-fold, about 3 to about 10-fold, about 4 to about 10-fold, about 1.1 to about 5-fold, about 1.1 to about 6-fold, about 1.1 to about 7-fold, about 1.1 to about 8-fold, about 1.1 to about 9-fold, about 2 to about 5-fold, about 2 to about 6-fold, about 2 to about 7-fold, about 2 to about 8-fold, about 2 to about 9-fold, about 3 to about 6-fold, about 3 to about 7-fold, about 3 to about 8-fold, about 3 to about 9-fold, about 4 to about 7-fold, about 4 to about 8-fold, about 4 to about 9-fold, at least about 1.1-fold, at least about 1.5-fold, at least about 2-fold, at least about 2.5-fold, at least about 3-fold, at least about 3.5-fold, at least about 4-fold, at least about 5-fold, or at least about 10-fold, compared to the total amount of the mRNA encoding the target protein or functional RNA produced in a control cell.

[0329] Embodiment A27. The method of any one of embodiments A1 to A25, wherein the total amount of the mRNA encoding the target protein or functional RNA produced in the cell contacted with the antisense oligomer is increased about 20% to about 300%, about 50% to about 300%, about 100% to about 300%, about 150% to about 300%, about 20% to about 50%, about 20% to about 100%, about 20% to about 150%, about 20% to about 200%, about 20% to about 250%, about 50% to about 100%, about 50% to about 150%, about 50% to about 200%, about 50% to about 250%, about 100% to about 150%, about 100% to about 200%, about 100% to about 250%, about 150% to about 200%, about 150% to about 250%, about 200% to about 250%, at least about 10%, at least about 20%, at least about 50%, at least about 100%, at least about 150%, at least about 200%, at least about 250%, or at least about 300%, compared to the total amount of the mRNA encoding the target protein or functional RNA produced in a control cell.

[0330] Embodiment A28. The method of one any of embodiments A1 to A25, wherein the total amount of target protein produced by the cell contacted with the antisense oligomer is increased about 1.1 to about 10-fold, about 1.5 to about 10-fold, about 2 to about 10-fold, about 3 to about 10-fold, about 4 to about 10-fold, about 1.1 to about 5-fold, about 1.1 to about 6-fold, about 1.1 to about 7-fold, about 1.1 to about 8-fold, about 1.1 to about 9-fold, about 2 to about 5-fold, about 2 to about 6-fold, about 2 to about 7-fold, about 2 to about 8-fold, about 2 to about 9-fold, about 3 to about 6-fold, about 3 to about 7-fold, about 3 to about 8-fold, about 3 to about 9-fold, about 4 to about 7-fold, about 4 to about 8-fold, about 4 to about 9-fold, at least about 1.1-fold, at least about 1.5-fold, at least about 2-fold, at least about 2.5-fold, at least about 3-fold, at least about 3.5-fold, at least about 4-fold, at least about 5-fold, or at least about 10-fold, compared to the total amount of target protein produced by a control cell.

[0331] Embodiment A29. The method of one any of embodiments A1 to A25, wherein the total amount of target protein produced by the cell contacted with the antisense oligomer is increased about 20% to about 300%, about 50% to about 300%, about 100% to about 300%, about 150% to about 300%, about 20% to about 50%, about 20% to about 100%, about 20% to about 150%, about 20% to about 200%, about 20% to about 250%, about 50% to about 100%, about 50% to about 150%, about 50% to about 200%, about 50% to about 250%, about 100% to about 150%, about 100% to about 200%, about 100% to about 250%, about 150% to about 200%, about 150% to about 250%, about 200% to about 250%, at least about 10%, at least about 20%, at least about 50%, at least about 100%, at least about 150%, at least about 200%, at least about 250%, or at least about 300%, compared to the total amount of target protein produced by a control cell.

[0332] Embodiment A30. The method of any one of embodiments A1 to 29, wherein the agent is an antisense oligomer (ASO) and wherein the antisense oligomer comprises a backbone modification comprising a phosphorothioate linkage or a phosphorodiamidate linkage.

[0333] Embodiment A31. The method of any one of embodiments A1 to A30, wherein the agent is an antisense oligomer (ASO) and wherein the antisense oligomer comprises a phosphorodiamidate morpholino, a locked nucleic acid, a peptide nucleic acid, a 2′-O-methyl, a 2′-Fluoro, or a 2′-O-methoxyethyl moiety.

[0334] Embodiment A32. The method of any one of embodiments A1 to A31, wherein the agent is an antisense oligomer (ASO) and wherein the antisense oligomer comprises at least one modified sugar moiety.

[0335] Embodiment A33. The method of embodiment A32, wherein each sugar moiety is a modified sugar moiety.

[0336] Embodiment A34. The method of any one of embodiments A1 to A33, wherein the agent is an antisense oligomer (ASO) and wherein the antisense oligomer consists of from 8 to 50 nucleobases, 8 to 40 nucleobases, 8 to 35 nucleobases, 8 to 30 nucleobases, 8 to 25 nucleobases, 8 to 20 nucleobases, 8 to 15 nucleobases, 9 to 50 nucleobases, 9 to 40 nucleobases, 9 to 35 nucleobases, 9 to 30 nucleobases, 9 to 25 nucleobases, 9 to 20 nucleobases, 9 to 15 nucleobases, 10 to 50 nucleobases, 10 to 40 nucleobases, 10 to 35 nucleobases, 10 to 30 nucleobases, 10 to 25 nucleobases, 10 to 20 nucleobases, 10 to 15 nucleobases, 11 to 50 nucleobases, 11 to 40 nucleobases, 11 to 35 nucleobases, 11 to 30 nucleobases, 11 to 25 nucleobases, 11 to 20 nucleobases, 11 to 15 nucleobases, 12 to 50 nucleobases, 12 to 40 nucleobases, 12 to 35 nucleobases, 12 to 30 nucleobases, 12 to 25 nucleobases, 12 to 20 nucleobases, or 12 to 15 nucleobases.

[0337] Embodiment A35. The method of any one of embodiments A1 to A34, wherein the agent is an antisense oligomer (ASO) and wherein the antisense oligomer is at least 80%, at least 85%, at least 90%, at least 95%, at least 98%, at least 99%, or 100%, complementary to the targeted portion of the NMD exon mRNA encoding the protein.

[0338] Embodiment A36. The method of any one of embodiments A1 to A35, wherein the method further comprises assessing OPA1 mRNA or protein expression.

[0339] Embodiment A37. The method of any one of embodiments A1 to A36, wherein Optic atrophy type 1 is treated and wherein the antisense oligomer binds to a targeted portion of an OPA1 NMD exon mRNA, wherein the targeted portion is within SEQ ID NO: 2 or 3.

[0340] Embodiment A38. The method of any one of embodiments A1 to A37, wherein the subject is a human.

[0341] Embodiment A39. The method of any one of embodiments A1 to A38, wherein the subject is a non-human animal.

[0342] Embodiment A40. The method of any one of embodiments A1 to A39, wherein the subject is a fetus, an embryo, or a child.

[0343] Embodiment A41. The method of any one of embodiments A1 to A40, wherein the cells are ex vivo.

[0344] Embodiment A42. The method of any one of embodiments A1 to A41, wherein the therapeutic agent is administered by intrathecal injection, intracerebroventricular injection, intraperitoneal injection, intramuscular injection, subcutaneous injection, or intravenous injection of the subject.

[0345] Embodiment A43. The method of any of embodiments A1 to A42, wherein the method further comprises administering a second therapeutic agent to the subject.

[0346] Embodiment A44. The method of embodiment A43, wherein the second therapeutic agent is a small molecule.

[0347] Embodiment A45. The method of embodiment A43, wherein the second therapeutic agent is an ASO.

[0348] Embodiment A46. The method of any one of embodiments A43 to A45, wherein the second therapeutic agent corrects intron retention.

[0349] Embodiment A47. An antisense oligomer as used in a method of any of embodiments A1 to A46.

[0350] Embodiment A48. An antisense oligomer comprising a sequence with at least about 80%, 85%, 90%, 95%, 97%, or 100% sequence identity to a region comprising at least 8 contiguous nucleic acids of SEQ ID NO: 2 or 3.

[0351] Embodiment A49. A pharmaceutical composition comprising the antisense oligomer of embodiment A47 or A48 and an excipient.

[0352] Embodiment A50. A method of treating a subject in need thereof, comprising administering the pharmaceutical composition of embodiment A49 to the subject, wherein the administering is by intravitreal injection, intrathecal injection, intracerebroventricular injection, intraperitoneal injection, intramuscular injection, subcutaneous injection, or intravenous injection.

[0353] Embodiment A51. A composition comprising a therapeutic agent for use in a method of increasing expression of a target protein or a functional RNA by cells to treat Optic atrophy type 1 in a subject in need thereof, associated with a deficient protein or deficient functional RNA, wherein the deficient protein or deficient functional RNA is deficient in amount or activity in the subject, wherein the target protein is:
[0354] (a) the deficient protein; or
[0355] (b) a compensating protein which functionally augments or replaces the deficient protein or in the subject;
[0356] and wherein the functional RNA is:
[0357] (c) the deficient RNA; or
[0358] (d) a compensating functional RNA which functionally augments or replaces the deficient functional RNA in the subject;
[0359] wherein the therapeutic agent enhances exclusion of the nonsense-mediated RNA decay-inducing exon from the NMD exon mRNA encoding the target protein or functional RNA, thereby increasing production or activity of the target protein or the functional RNA in the subject.

[0360] Embodiment A52. A composition comprising a therapeutic agent for use in a method of treating a condition associated with OPA1 protein in a subject in need thereof, the method comprising the step of increasing expression of OPA1 protein by cells of the subject, wherein the cells have an mRNA that contains a nonsense-mediated RNA decay-inducing exon (NMD exon mRNA) and encodes OPA1 protein, the method comprising contacting the cells with the therapeutic agent, whereby the nonsense-mediated RNA decay-inducing exon is excluded from the NMD exon mRNA that encodes OPA1 protein, thereby increasing the level of mRNA encoding OPA1 protein, and increasing the expression of OPA1 protein in the cells of the subject.

[0361] Embodiment A53. The composition of embodiment A52, wherein the condition is a disease or disorder.

[0362] Embodiment A54. The composition of embodiment A53, wherein the disease or disorder is Optic atrophy type 1.

[0363] Embodiment A55. The composition of any one of embodiments A52 to 54, wherein the OPA1 protein and NMD exon mRNA are encoded by the OPA1 gene.

[0364] Embodiment A56. The composition of any one of embodiments A51 to A55, wherein the nonsense-mediated RNA decay-inducing exon is spliced out from the NMD exon mRNA encoding the OPA1 protein.

[0365] Embodiment A57. The composition of any one of embodiments A51 to A56, wherein the OPA1 protein does not comprise an amino acid sequence encoded by the nonsense-mediated RNA decay-inducing exon.

[0366] Embodiment A58. The composition of any one of embodiments A51 to A57, wherein the OPA1 protein is a full-length OPA1 protein.

[0367] Embodiment A59. The composition of any one of embodiments A51 to A58, wherein the therapeutic agent is an antisense oligomer (ASO) complementary to the targeted portion of the NMD exon mRNA.

[0368] Embodiment A60. The composition of any of embodiments A51 to A59, wherein the therapeutic agent is an antisense oligomer (ASO) and wherein the antisense oligomer targets a portion of the NMD exon mRNA that is within the nonsense-mediated RNA decay-inducing exon.

[0369] Embodiment A61. The composition of any of embodiments A51 to A59, wherein the therapeutic agent is an antisense oligomer (ASO) and wherein the antisense oligomer targets a portion of the NMD exon mRNA that is upstream or downstream of the nonsense-mediated RNA decay-inducing exon.

[0370] Embodiment A62. The composition of any one of embodiments A51 to A61, wherein the target protein is OPA1.

[0371] Embodiment A63. The composition of embodiment A62, wherein the NMD exon mRNA comprises a sequence with at least about 80%, 85%, 90%, 95%, 97%, or 100% sequence identity to SEQ ID NO: 2 or 3.

[0372] Embodiment A64. The composition of embodiment A62, wherein the NMD exon mRNA is encoded by a genetic sequence with at least about 80%, 85%, 90%, 95%, 97%, or 100% sequence identity to SEQ ID NO: 1.

[0373] Embodiment A65. The composition of embodiment A62, wherein the targeted portion of the NMD exon mRNA comprises a sequence with at least 80%, 85%, 90%, 95%, 97%, or 100% sequence identity to a region comprising at least 8 contiguous nucleic acids of SEQ ID NO: 2 or 3.

[0374] Embodiment A66. The composition of any one of embodiments A62 to A65, wherein the targeted portion of the NMD exon mRNA is within the nonsense-mediated RNA decay-inducing exon 6x of OPA1, exon 7x of OPA1, or exon 28x of OPAL.

[0375] Embodiment A67. The composition of any one of embodiments A62 to A65, wherein the targeted portion of the NMD exon mRNA is upstream or downstream of the nonsense-mediated RNA decay-inducing exon 6x of OPA1, exon 7x of OPA1, or exon 28x of OPAL.

[0376] Embodiment A68. The composition of any one of embodiments A62 to A65, wherein the targeted portion of the NMD exon mRNA comprises an exon-intron junction of exon 6x of OPA1, exon 7x of OPA1, or exon 28x of OPAL.

[0377] Embodiment A69. The composition of any one of embodiments A62 to A68, wherein the therapeutic agent is an antisense oligomer (ASO) and wherein the ASO comprises a sequence that is at least about 80%, 85%, 90%, 95%, 97%, or 100% complementary to a region comprising at least 8 contiguous nucleic acids of SEQ ID NO: 2 or 3.

[0378] Embodiment A70. The composition of any one of embodiments A51 to A69, wherein the mRNA encoding the target protein or functional RNA is a full-length mature mRNA, or a wild-type mature mRNA.

[0379] Embodiment A71. The composition of any one of embodiments A51 to A70, wherein the target protein produced is full-length protein, or wild-type protein.

[0380] Embodiment A72. The composition of any one of embodiments A51 to A71, wherein the therapeutic agent is an antisense oligomer (ASO) and wherein the antisense oligomer comprises a backbone modification comprising a phosphorothioate linkage or a phosphorodiamidate linkage.

[0381] Embodiment A73. The composition of any of embodiments A51 to A72, wherein the therapeutic agent is an antisense oligomer (ASO) and wherein said antisense oligomer is an antisense oligonucleotide.

[0382] Embodiment A74. The composition of any of embodiments A51 to A73, wherein the therapeutic agent is an antisense oligomer (ASO) and wherein the antisense oligomer comprises a phosphorodiamidate morpholino, a locked nucleic acid, a peptide nucleic acid, a 2′-O-methyl, a 2′-Fluoro, or a 2′-O-methoxyethyl moiety.

[0383] Embodiment A75. The composition of any of embodiments A51 to A74, wherein the therapeutic agent is an antisense oligomer (ASO) and wherein the antisense oligomer comprises at least one modified sugar moiety.

[0384] Embodiment A76. The composition of embodiment A75, wherein each sugar moiety is a modified sugar moiety.

[0385] Embodiment A77. The composition of any of embodiments A51 to A76, wherein the therapeutic agent is an antisense oligomer (ASO) and wherein the antisense oligomer consists of from 8 to 50 nucleobases, 8 to 40 nucleobases, 8 to 35 nucleobases, 8 to 30 nucleobases, 8 to 25 nucleobases, 8 to 20 nucleobases, 8 to 15 nucleobases, 9 to 50 nucleobases, 9 to 40 nucleobases, 9 to 35 nucleobases, 9 to 30 nucleobases, 9 to 25 nucleobases, 9 to 20 nucleobases, 9 to 15 nucleobases, 10 to 50 nucleobases, 10 to 40 nucleobases, 10 to 35 nucleobases, 10 to 30 nucleobases, 10 to 25 nucleobases, 10 to 20 nucleobases, 10 to 15 nucleobases, 11 to 50 nucleobases, 11 to 40 nucleobases, 11 to 35 nucleobases, 11 to 30 nucleobases, 11 to 25 nucleobases, 11 to 20 nucleobases, 11 to 15 nucleobases, 12 to 50 nucleobases, 12 to 40 nucleobases, 12 to 35 nucleobases, 12 to 30 nucleobases, 12 to 25 nucleobases, 12 to 20 nucleobases, or 12 to 15 nucleobases.

[0386] Embodiment A78. A pharmaceutical composition comprising the therapeutic agent of any of the compositions of embodiments A51 to A77, and an excipient.

[0387] Embodiment A79. A method of treating a subject in need thereof, comprising administering the pharmaceutical composition of embodiment A78 to the subject, wherein the administering is by intravitreal injection, intrathecal injection, intracerebroventricular injection, intraperitoneal injection, intramuscular injection, subcutaneous injection, or intravenous injection.

[0388] Embodiment A80. The method of any of embodiments A51 to A79, wherein the method further comprises administering a second therapeutic agent to the subject.

[0389] Embodiment A81. The method of embodiment A80, wherein the second therapeutic agent is a small molecule.

[0390] Embodiment A82. The method of embodiment A80, wherein the second therapeutic agent is an ASO.

[0391] Embodiment A83. The method of any one of embodiments A80 to A82, wherein the second therapeutic agent corrects intron retention.

[0392] Embodiment A84. A pharmaceutical composition comprising: an antisense oligomer that hybridizes to a target sequence of an OPA1 mRNA transcript, wherein the OPA1 mRNA transcript comprises a nonsense-mediated RNA decay-inducing exon, wherein the antisense oligomer induces exclusion of the nonsense-mediated RNA decay-inducing exon from the OPA1 mRNA transcript; and a pharmaceutical acceptable excipient.

[0393] Embodiment A85. The pharmaceutical composition of embodiment A84, wherein the OPA1 mRNA transcript is an OPA1 NMD exon mRNA transcript.

[0394] Embodiment A86. The pharmaceutical composition of embodiment A84 or A85, wherein the targeted portion of the NMD exon mRNA is within the nonsense-mediated RNA decay-inducing exon 6x of OPA1, exon 7x of OPA1, or exon 28x of OPAL.

[0395] Embodiment A87. The pharmaceutical composition of embodiment A84 or A85, wherein the targeted portion of the NMD exon mRNA is upstream or downstream of the nonsense-mediated RNA decay-inducing exon 6x of OPA1, exon 7x of OPA1, or exon 28x of OPAL.

[0396] Embodiment A88. The pharmaceutical composition of embodiment A84 or A85, wherein the targeted portion of the NMD exon mRNA comprises an exon-intron junction exon 6x of OPA1, exon 7x of OPA1, or exon 28x of OPAL.

[0397] Embodiment A89. The pharmaceutical composition of any one of embodiments A84 to A88, wherein the OPA1 NMD exon mRNA transcript is encoded by a genetic sequence with at least about 80%, 85%, 90%, 95%, 96%, 97%, 98%, 99% or 100% sequence identity to SEQ ID NO: 1.

[0398] Embodiment A90. The pharmaceutical composition of embodiment A84 or A88, wherein the OPA1 NMD exon mRNA transcript comprises a sequence with at least about 80%, 85%, 90%, 95%, 96%, 97%, 98%, 99% or 100% sequence identity to SEQ ID NO: 2 or 3.

[0399] Embodiment A91. The pharmaceutical composition of embodiment A84, wherein the antisense oligomer comprises a backbone modification comprising a phosphorothioate linkage or a phosphorodiamidate linkage.

[0400] Embodiment A92. The pharmaceutical composition of embodiment A84, wherein the antisense oligomer is an antisense oligonucleotide.

[0401] Embodiment A93. The pharmaceutical composition of embodiment A84, wherein the antisense oligomer comprises a phosphorodiamidate morpholino, a locked nucleic acid, a peptide nucleic acid, a 2′-O-methyl, a 2′-Fluoro, or a 2′-O-methoxyethyl moiety.

[0402] Embodiment A94. The pharmaceutical composition of embodiment A84, wherein the antisense oligomer comprises at least one modified sugar moiety.

[0403] Embodiment A95. The pharmaceutical composition of embodiment A84, wherein the antisense oligomer comprises from 8 to 50 nucleobases, 8 to 40 nucleobases, 8 to 35 nucleobases, 8 to 30 nucleobases, 8 to 25 nucleobases, 8 to 20 nucleobases, 8 to 15 nucleobases, 9 to 50 nucleobases, 9 to 40 nucleobases, 9 to 35 nucleobases, 9 to 30 nucleobases, 9 to 25 nucleobases, 9 to 20 nucleobases, 9 to 15 nucleobases, 10 to 50 nucleobases, 10 to 40 nucleobases, 10 to 35 nucleobases, 10 to 30 nucleobases, 10 to 25 nucleobases, 10 to 20 nucleobases, 10 to 15 nucleobases, 11 to 50 nucleobases, 11 to 40 nucleobases, 11 to 35 nucleobases, 11 to 30 nucleobases, 11 to 25 nucleobases, 11 to 20 nucleobases, 11 to 15 nucleobases, 12 to 50 nucleobases, 12 to 40 nucleobases, 12 to 35 nucleobases, 12 to 30 nucleobases, 12 to 25 nucleobases, 12 to 20 nucleobases, or 12 to 15 nucleobases.

[0404] Embodiment A96. The pharmaceutical composition of embodiment A84 or A85, wherein the antisense oligomer is at least 80%, at least 85%, at least 90%, at least 95%, at least 98%, at least 99%, or is 100% complementary to a targeted portion of the OPA1 NMD exon mRNA transcript.

[0405] Embodiment A97. The pharmaceutical composition of embodiment A84 or A85, wherein the targeted portion of the OPA1 NMD exon mRNA transcript is within SEQ ID NO: 2 or 3.

[0406] Embodiment A98. The pharmaceutical composition of embodiment A84, wherein the antisense oligomer comprises a nucleotide sequence that is at least about 80%, 85%, 90%, 91%, 92%, 93%, 94%, 95%, 96%, 97%, 98%, or 99% sequence identity to a region comprising at least 8 contiguous nucleic acids of SEQ ID NO: 2 or 3.

[0407] Embodiment A99. The pharmaceutical composition of embodiment A84, wherein the antisense oligomer comprises a nucleotide sequence that is identical a region comprising at least 8 contiguous nucleic acids SEQ ID NO: 2 or 3.

[0408] Embodiment A100. The pharmaceutical composition of any one of the embodiments A84 to A99, wherein the pharmaceutical composition is formulated for intravitreal injection, intrathecal injection, intracerebroventricular injection, intraperitoneal injection, intramuscular injection, subcutaneous injection, or intravenous injection.

[0409] Embodiment A101. The method of any of embodiments A84 to A100, wherein the method further comprises administering a second therapeutic agent to the subject.

[0410] Embodiment A102. The method of embodiment A101, wherein the second therapeutic agent is a small molecule.

[0411] Embodiment A103. The method of embodiment A101, wherein the second therapeutic agent is an ASO.

[0412] Embodiment A104. The method of any one of embodiments A101 to A103, wherein the second therapeutic agent corrects intron retention.

[0413] Embodiment A105. A method of inducing processing of a deficient OPA1 mRNA transcript to facilitate removal of a nonsense-mediated RNA decay-inducing exon to produce a fully processed OPA1 mRNA transcript that encodes a functional form of an OPA1 protein, the method comprising:
[0414] (a) contacting an antisense oligomer to a target cell of a subject;
[0415] (b) hybridizing the antisense oligomer to the deficient OPA1 mRNA transcript, wherein the deficient OPA1 mRNA transcript is capable of encoding the functional form of an OPA1 protein and comprises at least one nonsense-mediated RNA decay-inducing exon;
[0416] (c) removing the at least one nonsense-mediated RNA decay-inducing exon from the deficient OPA1 mRNA transcript to produce the fully processed OPA1 mRNA transcript that encodes the functional form of OPA1 protein; and
[0417] (d) translating the functional form of OPA1 protein from the fully processed OPA1 mRNA transcript.

[0418] Embodiment A106. A method of treating a subject having a condition caused by a deficient amount or activity of OPA1 protein comprising administering to the subject an antisense oligomer comprising a nucleotide sequence with at least about 80%, 85%, 90%, 91%, 92%, 93%, 94%, 95%, 96%, 97%, 98%, or 99% sequence identity to a region comprising at least 8 contiguous nucleic acids of SEQ ID NO: 2 or 3.

[0419] Embodiment A107. A method of treating Optic atrophy type 1 in a subject in need thereof, by increasing the expression of a target protein or functional RNA by a cell of the subject, wherein the cell has an mRNA that contains a nonsense-mediated RNA decay-inducing exon (NMD exon mRNA), and wherein the NMD exon mRNA encodes the target protein or functional RNA, the method comprising contacting the cell of the subject with a therapeutic agent that modulates splicing of the NMD exon mRNA encoding the target protein or functional RNA, whereby the nonsense-mediated RNA decay-inducing exon is excluded from the NMD exon mRNA encoding the target protein or functional RNA, thereby increasing the level of mRNA encoding the target protein or functional RNA, and increasing the expression of the target protein or functional RNA in the cell of the subject.

[0420] Embodiment A108. A method of increasing expression of OPA1 protein by a cell having an mRNA that contains a nonsense-mediated RNA decay-inducing exon (NMD exon mRNA) and encodes OPA1 protein, the method comprising contacting the cell with an agent that modulates splicing of the NMD exon mRNA encoding OPA1 protein, whereby the nonsense-mediated RNA decay-inducing exon is excluded from the NMD exon mRNA encoding OPA1 protein, thereby increasing the level of mRNA encoding OPA1 protein, and increasing the expression of OPA1 protein in the cell.

[0421] Embodiment A109. The method of embodiment A107 or A108, wherein the agent
[0422] (a) binds to a targeted portion of the NMD exon mRNA encoding the target protein or functional RNA;
[0423] (b) binds to one or more components of a spliceosome; or
[0424] (c) a combination of (a) and (b).

[0425] Embodiment B1. A method of modulating expression of a target protein, by a cell having an mRNA that comprises a nonsense-mediated RNA decay-inducing exon (NMD exon) and encodes the target protein, the method comprising contacting a therapeutic agent to the cell, whereby the therapeutic agent modulates splicing of the NMD exon from the mRNA, thereby modulating level of processed mRNA encoding the target protein, and modulating the expression of the target protein in the cell, wherein the target protein is selected from the group consisting of: OPA1 proteins.

[0426] Embodiment B2. A method of treating a disease or condition in a subject in need thereof by modulating expression of a target protein in a cell of the subject, comprising: contacting the cell of the subject with a therapeutic agent that modulates splicing of a nonsense-mediated mRNA decay-inducing exon (NMD exon) from an mRNA in the cell, wherein the mRNA comprises the NMD exon and encodes the target protein, thereby modulating level of processed mRNA encoding the target protein, and modulating expression of the target protein in the cell of the subject, wherein the target protein is selected from the group consisting of: OPA1 proteins.

[0427] Embodiment B3. The method of embodiment B1 or B2, wherein the therapeutic agent
[0428] (a) binds to a targeted portion of the mRNA encoding the target protein;
[0429] (b) modulates binding of a factor involved in splicing of the NMD exon; or
[0430] (c) a combination of (a) and (b).

[0431] Embodiment B4. The method of embodiment B3, wherein the therapeutic agent interferes with binding of the factor involved in splicing of the NMD exon to a region of the targeted portion.

[0432] Embodiment B5. The method of embodiment B3 or B4, wherein the targeted portion is proximal to the NMD exon.

[0433] Embodiment B6. The method of any one of embodiments B3 to B5, wherein the targeted portion is at most about 1500 nucleotides, about 1000 nucleotides, about 800 nucleotides, about 700 nucleotides, about 600 nucleotides, about 500 nucleotides, about 400 nucleotides, about 300 nucleotides, about 200 nucleotides, about 100 nucleotides, about 80 nucleotides, about 70 nucleotides, about 60 nucleotides, about 50 nucleotides upstream of 5′ end of the NMD exon.

[0434] Embodiment B7. The method of any one of embodiments B3 to B6, wherein the targeted portion is at least about 1500 nucleotides, about 1000 nucleotides, about 800 nucleotides, about 700 nucleotides, about 600 nucleotides, about 500 nucleotides, about 400 nucleotides, about 300 nucleotides, about 200 nucleotides, about 100 nucleotides, about 80 nucleotides, about 70 nucleotides, about 60 nucleotides, about 50 nucleotides, about 40 nucleotides, about 30 nucleotides, about 20 nucleotides, about 10 nucleotides, about 5 nucleotides, about 4 nucleotides, about 2 nucleotides, about 1 nucleotides upstream of 5′ end of the NMD exon.

[0435] Embodiment B8. The method of any one of embodiments B3 to B5, wherein the targeted portion is at most about 1500 nucleotides, about 1000 nucleotides, about 800 nucleotides, about 700 nucleotides, about 600 nucleotides, about 500 nucleotides, about 400 nucleotides, about 300 nucleotides, about 200 nucleotides, about 100 nucleotides, about 80 nucleotides, about 70 nucleotides, about 60 nucleotides, about 50 nucleotides downstream of 3′ end of the NMD exon.

[0436] Embodiment B9. The method of any one of embodiments B3 to B5 or B8, wherein the targeted portion is at least about 1500 nucleotides, about 1000 nucleotides, about 800 nucleotides, about 700 nucleotides, about 600 nucleotides, about 500 nucleotides, about 400 nucleotides, about 300 nucleotides, about 200 nucleotides, about 100 nucleotides, about 80 nucleotides, about 70 nucleotides, about 60 nucleotides, about 50 nucleotides, about 40 nucleotides, about 30 nucleotides, about 20 nucleotides, about 10 nucleotides, about 5 nucleotides, about 4 nucleotides, about 2 nucleotides, about 1 nucleotides downstream of 3′ end of the NMD exon.

[0437] Embodiment B10. The method of any one of embodiments B3 to B5, wherein the targeted portion is at most about 1500 nucleotides, about 1000 nucleotides, about 800 nucleotides, about 700 nucleotides, about 600 nucleotides, about 500 nucleotides, about 400 nucleotides, about 300 nucleotides, about 200 nucleotides, about 100 nucleotides, about 80 nucleotides, about 70 nucleotides, about 60 nucleotides, about 50 nucleotides upstream of genomic site selected from the group consisting of: GRCh38/hg38: chr3 193628509; and GRCh38/hg38: chr3 193603500.

[0438] Embodiment B11. The method of any one of embodiments B3 to B5 or B10, wherein the targeted portion is about 1500 nucleotides, about 1000 nucleotides, about 800 nucleotides, about 700 nucleotides, about 600 nucleotides, about 500 nucleotides, about 400 nucleotides, about 300 nucleotides, about 200 nucleotides, about 100 nucleotides, about 80 nucleotides, about 70 nucleotides, about 60 nucleotides, about 50 nucleotides upstream of genomic site selected from the group consisting of: GRCh38/hg38: chr3 193628509; and GRCh38/hg38: chr3 193603500.

[0439] Embodiment B12. The method of any one of embodiments B3 to B5, wherein the targeted portion is at most about 1500 nucleotides, about 1000 nucleotides, about 800 nucleotides, about 700 nucleotides, about 600 nucleotides, about 500 nucleotides, about 400 nucleotides, about 300 nucleotides, about 200 nucleotides, about 100 nucleotides, about 80 nucleotides, about 70 nucleotides, about 60 nucleotides, about 50 nucleotides downstream of genomic site selected from the group consisting of: GRCh38/hg38: chr3 193628616; and GRCh38/hg38: chr3 193603557.

[0440] Embodiment B13. The method of any one of embodiments B3 to B5 or B12, wherein the targeted portion is about 1500 nucleotides, about 1000 nucleotides, about 800 nucleotides, about 700 nucleotides, about 600 nucleotides, about 500 nucleotides, about 400 nucleotides, about 300 nucleotides, about 200 nucleotides, about 100 nucleotides, about 80 nucleotides, about 70 nucleotides, about 60 nucleotides, about 50 nucleotides downstream of genomic site selected from the group consisting of: GRCh38/hg38: chr3 193628616; and GRCh38/hg38: chr3 193603557.

[0441] Embodiment B14. The method of any one of embodiments B3 to B13, wherein the targeted portion is located in an intronic region between two canonical exonic regions of the mRNA encoding the target protein, and wherein the intronic region contains the NMD exon.

[0442] Embodiment B15. The method of any one of embodiments B3 to B14, wherein the targeted portion at least partially overlaps with the NMD exon.

[0443] Embodiment B16. The method of any one of embodiments B3 to B15, wherein the targeted portion at least partially overlaps with an intron upstream or downstream of the NMD exon.

[0444] Embodiment B17. The method of any one of embodiments B3 to B16, wherein the targeted portion comprises 5′ NMD exon-intron junction or 3′ NMD exon-intron junction.

[0445] Embodiment B18. The method of any one of embodiments B3 to B16, wherein the targeted portion is within the NMD exon.

[0446] Embodiment B19. The method of any one of embodiments B1 to B18, wherein the targeted portion comprises about 5, 6, 7, 8, 9, 10, 11, 12, 13, 14, 15, 16, 17, 18, 19, 20, 21, 22, 23, 24, 25, 26, 27, 28, 29, 30, or more consecutive nucleotides of the NMD exon.

[0447] Embodiment B20. The method of any one of embodiments B1 to B19, wherein the mRNA encoding the target protein comprises a sequence with at least about 80%, 85%, 90%, 95%, 97%, or 100% sequence identity to SEQ ID NO: 4 or 5.

[0448] Embodiment B21. The method of any one of embodiments B1 to B20, wherein the mRNA encoding the target protein is encoded by a genetic sequence with at least about 80%, 85%, 90%, 95%, 97%, or 100% sequence identity to SEQ ID NO: 1.

[0449] Embodiment B22. The method of any one of embodiments B3 to B21, wherein the targeted portion of the mRNA comprises a sequence with at least 80%, 85%, 90%, 95%, 97%, or 100% sequence identity to a region comprising at least 8 contiguous nucleic acids of SEQ ID NO: 4 or 5.

[0450] Embodiment B23. The method of any one of embodiments B1 to B22, wherein the agent is an antisense oligomer (ASO) and wherein the ASO comprises a sequence that is at least about 80%, 85%, 90%, 95%, 97%, or 100% complementary to at least 8 contiguous nucleic acids of SEQ ID Ns: 4 or 5.

[0451] Embodiment B24. The method of any one of embodiments B3 to B23, wherein the targeted portion of the mRNA is within the nonsense-mediated RNA decay-inducing exon selected from the group consisting of: GRCh38/hg38: chr3 193628509 193628616; and GRCh38/hg38: chr3 193603500 193603557.

[0452] Embodiment B25. The method of any one of embodiments B3 to B23, wherein the targeted portion of the mRNA is upstream or downstream of the nonsense-mediated RNA decay-inducing exon selected from the group consisting of: GRCh38/hg38: chr3 193628509 193628616; and GRCh38/hg38: chr3 193603500 193603557.

[0453] Embodiment B26. The method of any one of embodiments B3 to B23, wherein the targeted portion of the mRNA comprises an exon-intron junction of exon selected from the group consisting of: GRCh38/hg38: chr3 193628509 193628616; and GRCh38/hg38: chr3 193603500 193603557.

[0454] Embodiment B27. The method of any one of embodiments B1 to B26, wherein the target protein produced is a full-length protein or a wild-type protein.

[0455] Embodiment B28. The method of any one of embodiments B1 to B27, wherein the therapeutic agent promotes exclusion of the NMD exon from the pre-mRNA encoding the target protein.

[0456] Embodiment B29. The method of embodiment B28, wherein exclusion of the NMD exon from the pre-mRNA encoding the target protein in the cell contacted with the therapeutic agent is increased by about 1.1 to about 10-fold, about 1.5 to about 10-fold, about 2 to about 10-fold, about 3 to about 10-fold, about 4 to about 10-fold, about 1.1 to about 5-fold, about 1.1 to about 6-fold, about 1.1 to about 7-fold, about 1.1 to about 8-fold, about 1.1 to about 9-fold, about 2 to about 5-fold, about 2 to about 6-fold, about 2 to about 7-fold, about 2 to about 8-fold, about 2 to about 9-fold, about 3 to about 6-fold, about 3 to about 7-fold, about 3 to about 8-fold, about 3 to about 9-fold, about 4 to about 7-fold, about 4 to about 8-fold, about 4 to about 9-fold, at least about 1.1-fold, at least about 1.5-fold, at least about 2-fold, at least about 2.5-fold, at least about 3-fold, at least about 3.5-fold, at least about 4-fold, at least about 5-fold, or at least about 10-fold, compared to exclusion of the NMD exon from the pre-mRNA encoding the target protein in a control cell.

[0457] Embodiment B30. The method of embodiment B28 or B29, wherein the therapeutic agent increases the level of the processed mRNA encoding the target protein in the cell.

[0458] Embodiment B31. The method of any one of embodiments B28 to B30, wherein the level of the processed mRNA encoding the target protein produced in the cell contacted with the therapeutic agent is increased by about 1.1 to about 10-fold, about 1.5 to about 10-fold, about 2 to about 10-fold, about 3 to about 10-fold, about 4 to about 10-fold, about 1.1 to about 5-fold, about 1.1 to about 6-fold, about 1.1 to about 7-fold, about 1.1 to about 8-fold, about 1.1 to about 9-fold, about 2 to about 5-fold, about 2 to about 6-fold, about 2 to about 7-fold, about 2 to about 8-fold, about 2 to about 9-fold, about 3 to about 6-fold, about 3 to about 7-fold, about 3 to about 8-fold, about 3 to about 9-fold, about 4 to about 7-fold, about 4 to about 8-fold, about 4 to about 9-fold, at least about 1.1-fold, at least about 1.5-fold, at least about 2-fold, at least about 2.5-fold, at least about 3-fold, at least about 3.5-fold, at least about 4-fold, at least about 5-fold, or at least about 10-fold, compared to a level of the processed mRNA encoding the target protein in a control cell.

[0459] Embodiment B32. The method of any one of embodiments B28 to B31, wherein the therapeutic agent increases the expression of the target protein in the cell.

[0460] Embodiment B33. The method of any one of embodiments B28 to B32, wherein a level of the target protein produced in the cell contacted with the therapeutic agent is increased by about 1.1 to about 10-fold, about 1.5 to about 10-fold, about 2 to about 10-fold, about 3 to about 10-fold, about 4 to about 10-fold, about 1.1 to about 5-fold, about 1.1 to about 6-fold, about 1.1 to about 7-fold, about 1.1 to about 8-fold, about 1.1 to about 9-fold, about 2 to about 5-fold, about 2 to about 6-fold, about 2 to about 7-fold, about 2 to about 8-fold, about 2 to about 9-fold, about 3 to about 6-fold, about 3 to about 7-fold, about 3 to about 8-fold, about 3 to about 9-fold, about 4 to about 7-fold, about 4 to about 8-fold, about 4 to about 9-fold, at least about 1.1-fold, at least about 1.5-fold, at least about 2-fold, at least about 2.5-fold, at least about 3-fold, at least about 3.5-fold, at least about 4-fold, at least about 5-fold, or at least about 10-fold, compared to a level of the target protein produced in a control cell.

[0461] Embodiment B34. The method of any one of embodiments B2 to B33, wherein the disease or condition is induced by a loss-of-function mutation in the target protein.

[0462] Embodiment B35. The method of embodiment B34, wherein the disease or condition is associated with haploinsufficiency of a gene encoding the target protein, and wherein the subject has a first allele encoding a functional target protein, and a second allele from which the target protein is not produced or produced at a reduced level, or a second allele encoding a nonfunctional target protein or a partially functional target protein.

[0463] Embodiment B36. The method of any one of embodiments B2 to B35, wherein the disease or condition is selected from the group consisting of. Optic atrophy type 1.

[0464] Embodiment B37. The method of any one of embodiments B34 to B36, wherein the therapeutic agent promotes exclusion of the NMD exon from the pre-mRNA encoding the target protein and increases the expression of the target protein in the cell.

[0465] Embodiment B38. The method of any one of embodiments B1 to B27, wherein the therapeutic agent inhibits exclusion of the NMD exon from the pre-mRNA encoding the target protein.

[0466] Embodiment B39. The method of embodiment B38, wherein exclusion of the NMD exon from the pre-mRNA encoding the target protein in the cell contacted with the therapeutic agent is decreased by about 1.1 to about 10-fold, about 1.5 to about 10-fold, about 2 to about 10-fold, about 3 to about 10-fold, about 4 to about 10-fold, about 1.1 to about 5-fold, about 1.1 to about 6-fold, about 1.1 to about 7-fold, about 1.1 to about 8-fold, about 1.1 to about 9-fold, about 2 to about 5-fold, about 2 to about 6-fold, about 2 to about 7-fold, about 2 to about 8-fold, about 2 to about 9-fold, about 3 to about 6-fold, about 3 to about 7-fold, about 3 to about 8-fold, about 3 to about 9-fold, about 4 to about 7-fold, about 4 to about 8-fold, about 4 to about 9-fold, at least about 1.1-fold, at least about 1.5-fold, at least about 2-fold, at least about 2.5-fold, at least about 3-fold, at least about 3.5-fold, at least about 4-fold, at least about 5-fold, or at least about 10-fold, compared to exclusion of the NMD exon from the pre-mRNA encoding the target protein in a control cell.

[0467] Embodiment B40. The method of embodiment B38 or B39, wherein the therapeutic agent decreases the level of the processed mRNA encoding the target protein in the cell.

[0468] Embodiment B41. The method of any one of embodiments B38 to B40, wherein the level of the processed mRNA encoding the target protein in the cell contacted with the therapeutic agent is decreased by about 1.1 to about 10-fold, about 1.5 to about 10-fold, about 2 to about 10-fold, about 3 to about 10-fold, about 4 to about 10-fold, about 1.1 to about 5-fold, about 1.1 to about 6-fold, about 1.1 to about 7-fold, about 1.1 to about 8-fold, about 1.1 to about 9-fold, about 2 to about 5-fold, about 2 to about 6-fold, about 2 to about 7-fold, about 2 to about 8-fold, about 2 to about 9-fold, about 3 to about 6-fold, about 3 to about 7-fold, about 3 to about 8-fold, about 3 to about 9-fold, about 4 to about 7-fold, about 4 to about 8-fold, about 4 to about 9-fold, at least about 1.1-fold, at least about 1.5-fold, at least about 2-fold, at least about 2.5-fold, at least about 3-fold, at least about 3.5-fold, at least about 4-fold, at least about 5-fold, or at least about 10-fold, compared to a level of the processed mRNA encoding the target protein in a control cell.

[0469] Embodiment B42. The method of any one of embodiments B38 to B41, wherein the therapeutic agent decreases the expression of the target protein in the cell.

[0470] Embodiment B43. The method of any one of embodiments B38 to B42, wherein a level of the target protein produced in the cell contacted with the therapeutic agent is decreased by about 1.1 to about 10-fold, about 1.5 to about 10-fold, about 2 to about 10-fold, about 3 to about 10-fold, about 4 to about 10-fold, about 1.1 to about 5-fold, about 1.1 to about 6-fold, about 1.1 to about 7-fold, about 1.1 to about 8-fold, about 1.1 to about 9-fold, about 2 to about 5-fold, about 2 to about 6-fold, about 2 to about 7-fold, about 2 to about 8-fold, about 2 to about 9-fold, about 3 to about 6-fold, about 3 to about 7-fold, about 3 to about 8-fold, about 3 to about 9-fold, about 4 to about 7-fold, about 4 to about 8-fold, about 4 to about 9-fold, at least about 1.1-fold, at least about 1.5-fold, at least about 2-fold, at least about 2.5-fold, at least about 3-fold, at least about 3.5-fold, at least about 4-fold, at least about 5-fold, or at least about 10-fold, compared to a level of the target protein produced in a control cell.

[0471] Embodiment B44. The method of any one of embodiments B2 to B27 or B38 to B43, wherein the disease or condition is induced by a gain-of-function mutation in the target protein.

[0472] Embodiment B45. The method of embodiment B44, wherein the subject has an allele from which the target protein is produced at an increased level, or an allele encoding a mutant target protein that exhibits increased activity in the cell.

[0473] Embodiment B46. The method of embodiment B44 or B45, wherein the therapeutic agent inhibits exclusion of the NMD exon from the pre-mRNA encoding the target protein and decreases the expression of the target protein in the cell.

[0474] Embodiment B47. The method of any one of embodiments B1 to B46, wherein the therapeutic agent is an antisense oligomer (ASO) and wherein the antisense oligomer comprises a backbone modification comprising a phosphorothioate linkage or a phosphorodiamidate linkage.

[0475] Embodiment B48. The method of any one of embodiments B1 to B47, wherein the therapeutic agent is an antisense oligomer (ASO) and wherein the antisense oligomer comprises a phosphorodiamidate morpholino, a locked nucleic acid, a peptide nucleic acid, a 2′-O-methyl, a 2′-Fluoro, or a 2′-O-methoxyethyl moiety.

[0476] Embodiment B49. The method of any one of embodiments B1 to B48, wherein the therapeutic agent is an antisense oligomer (ASO) and wherein the antisense oligomer comprises at least one modified sugar moiety.

[0477] Embodiment B50. The method of embodiment B49, wherein each sugar moiety is a modified sugar moiety.

[0478] Embodiment B51. The method of any one of embodiments B1 to B50, wherein the therapeutic agent is an antisense oligomer (ASO) and wherein the antisense oligomer consists of from 8 to 50 nucleobases, 8 to 40 nucleobases, 8 to 35 nucleobases, 8 to 30 nucleobases, 8 to 25 nucleobases, 8 to 20 nucleobases, 8 to 15 nucleobases, 9 to 50 nucleobases, 9 to 40 nucleobases, 9 to 35 nucleobases, 9 to 30 nucleobases, 9 to 25 nucleobases, 9 to 20 nucleobases, 9 to 15 nucleobases, 10 to 50 nucleobases, 10 to 40 nucleobases, 10 to 35 nucleobases, 10 to 30 nucleobases, 10 to 25 nucleobases, 10 to 20 nucleobases, 10 to 15 nucleobases, 11 to 50 nucleobases, 11 to 40 nucleobases, 11 to 35 nucleobases, 11 to 30 nucleobases, 11 to 25 nucleobases, 11 to 20 nucleobases, 11 to 15 nucleobases, 12 to 50 nucleobases, 12 to 40 nucleobases, 12 to 35 nucleobases, 12 to 30 nucleobases, 12 to 25 nucleobases, 12 to 20 nucleobases, or 12 to 15 nucleobases.

[0479] Embodiment B52. The method of any one of embodiments B3 to B51, wherein the therapeutic agent is an antisense oligomer (ASO) and wherein the antisense oligomer is at least 80%, at least 85%, at least 90%, at least 95%, at least 98%, at least 99%, or 100%, complementary to the targeted portion of the mRNA.

[0480] Embodiment B53. The method of any one of embodiments B1 to B52, wherein the method further comprises assessing mRNA level or expression level of the target protein.

[0481] Embodiment B54. The method of any one of embodiments B1 to B53, wherein the subject is a human.

[0482] Embodiment B55. The method of any one of embodiments B1 to B53, wherein the subject is a non-human animal.

[0483] Embodiment B56. The method of any one of embodiments B2 to B54, wherein the subject is a fetus, an embryo, or a child.

[0484] Embodiment B57. The method of any one of embodiments B1 to B56, wherein the cells are ex vivo.

[0485] Embodiment B58. The method of any one of embodiments B2 to B56, wherein the therapeutic agent is administered by intravitreal injection, intrathecal injection, intracerebroventricular injection, intraperitoneal injection, intramuscular injection, subcutaneous injection, intravitreal, or intravenous injection of the subject.

[0486] Embodiment B59. The method of any one of embodiments B2 to B56 or B58, wherein the method further comprises administering a second therapeutic agent to the subject.

[0487] Embodiment B60. The method of any one of embodiments B1 to B59, wherein the second therapeutic agent is a small molecule.

[0488] Embodiment B61. The method of any one of embodiments B1 to B59, wherein the second therapeutic agent is an antisense oligomer.

[0489] Embodiment B62. The method of any one of embodiments B1 to B61, wherein the second therapeutic agent corrects intron retention.

[0490] Embodiment B63. The method of any one of embodiments B2 to B62, wherein the disease or condition is Optic atrophy type 1.

### FURTHER SPECIFIC EMBODIMENTS

[0491] Embodiment 1. A method of modulating expression of an OPA1 protein in a cell having a pre-mRNA that is transcribed from an OPA1 gene and that comprises a nonsense-mediated RNA decay-inducing exon (NMD exon), the method comprising contacting an agent or a vector encoding the agent to the cell, whereby the agent modulates splicing of the NMD exon from the pre-mRNA, thereby modulating a level of processed mRNA that is processed from the pre-mRNA, and modulating the expression of the OPA1 protein in the cell, wherein the agent comprises an antisense oligomer with at least 80% sequence identity to a sequence selected from the group consisting of SEQ ID NOs: 6-275 and 280-299.

[0492] Embodiment 2. The method of embodiment 1, wherein the agent:
[0493] (a) binds to a targeted portion of the pre-mRNA;
[0494] (b) modulates binding of a factor involved in splicing of the NMD exon; or
[0495] (c) a combination of (a) and (b).

[0496] Embodiment 3. The method of embodiment 2, wherein the agent interferes with binding of the factor involved in splicing of the NMD exon to a region of the targeted portion.

[0497] Embodiment 4. The method of embodiment 2, wherein the targeted portion of the pre-mRNA is proximal to the NMD exon.

[0498] Embodiment 5. The method of embodiment 2, wherein the targeted portion of the pre-mRNA is at most about 1500 nucleotides, about 1000 nucleotides, about 800 nucleotides, about 700 nucleotides, about 600 nucleotides, about 500 nucleotides, about 400 nucleotides, about 300 nucleotides, about 200 nucleotides, about 100 nucleotides, about 80 nucleotides, about 70 nucleotides, about 60 nucleotides, about 50 nucleotides upstream of 5′ end of the NMD exon.

[0499] Embodiment 6. The method of embodiment 2, wherein the targeted portion of the pre-mRNA is at least about 1500 nucleotides, about 1000 nucleotides, about 800 nucleotides, about 700 nucleotides, about 600 nucleotides, about 500 nucleotides, about 400 nucleotides, about 300 nucleotides, about 200 nucleotides, about 100 nucleotides, about 80 nucleotides, about 70 nucleotides, about 60 nucleotides, about 50 nucleotides, about 40 nucleotides, about 30 nucleotides, about 20 nucleotides, about 10 nucleotides, about 5 nucleotides, about 4 nucleotides, about 2 nucleotides, about 1 nucleotides upstream of 5′ end of the NMD exon.

[0500] Embodiment 7. The method of embodiment 2, wherein the targeted portion of the pre-mRNA is at most about 1500 nucleotides, about 1000 nucleotides, about 800 nucleotides, about 700 nucleotides, about 600 nucleotides, about 500 nucleotides, about 400 nucleotides, about 300 nucleotides, about 200 nucleotides, about 100 nucleotides, about 80 nucleotides, about 70 nucleotides, about 60 nucleotides, about 50 nucleotides downstream of 3′ end of the NMD exon.

[0501] Embodiment 8. The method of embodiment 2, wherein the targeted portion of the pre-mRNA is at least about 1500 nucleotides, about 1000 nucleotides, about 800 nucleotides, about 700 nucleotides, about 600 nucleotides, about 500 nucleotides, about 400 nucleotides, about 300 nucleotides, about 200 nucleotides, about 100 nucleotides, about 80 nucleotides, about 70 nucleotides, about 60 nucleotides, about 50 nucleotides, about 40 nucleotides, about 30 nucleotides, about 20 nucleotides, about 10 nucleotides, about 5 nucleotides, about 4 nucleotides, about 2 nucleotides, about 1 nucleotides downstream of 3′ end of the NMD exon.

[0502] Embodiment 9. The method of embodiment 2, wherein the targeted portion of the pre-mRNA is at most about 1500 nucleotides, about 1000 nucleotides, about 800 nucleotides, about 700 nucleotides, about 600 nucleotides, about 500 nucleotides, about 400 nucleotides, about 300 nucleotides, about 200 nucleotides, about 100 nucleotides, about 80 nucleotides, about 70 nucleotides, about 60 nucleotides, about 50 nucleotides upstream of genomic site GRCh38/hg38: chr3 193628509.

[0503] Embodiment 10. The method of embodiment 2, wherein the targeted portion of the pre-mRNA is about 1500 nucleotides, about 1000 nucleotides, about 800 nucleotides, about 700 nucleotides, about 600 nucleotides, about 500 nucleotides, about 400 nucleotides, about 300 nucleotides, about 200 nucleotides, about 100 nucleotides, about 80 nucleotides, about 70 nucleotides, about 60 nucleotides, about 50 nucleotides upstream of genomic site GRCh38/hg38: chr3 193628509.

[0504] Embodiment 11. The method of embodiment 2, wherein the targeted portion of the pre-mRNA is at most about 1500 nucleotides, about 1000 nucleotides, about 800 nucleotides, about 700 nucleotides, about 600 nucleotides, about 500 nucleotides, about 400 nucleotides, about 300 nucleotides, about 200 nucleotides, about 100 nucleotides, about 80 nucleotides, about 70 nucleotides, about 60 nucleotides, about 50 nucleotides downstream of genomic site GRCh38/hg38: chr3 193628616.

[0505] Embodiment 12. The method of embodiment 2, wherein the targeted portion of the pre-mRNA is about 1500 nucleotides, about 1000 nucleotides, about 800 nucleotides, about 700 nucleotides, about 600 nucleotides, about 500 nucleotides, about 400 nucleotides, about 300 nucleotides, about 200 nucleotides, about 100 nucleotides, about 80 nucleotides, about 70 nucleotides, about 60 nucleotides, about 50 nucleotides downstream of genomic site GRCh38/hg38: chr3 193628616.

[0506] Embodiment 13. The method of embodiment 2, wherein the targeted portion of the pre-mRNA is located in an intronic region between two canonical exonic regions of the pre-mRNA, and wherein the intronic region contains the NMD exon.

[0507] Embodiment 14. The method of embodiment 2, wherein the targeted portion of the pre-mRNA at least partially overlaps with the NMD exon.

[0508] Embodiment 15. The method of embodiment 2, wherein the targeted portion of the pre-mRNA at least partially overlaps with an intron upstream or downstream of the NMD exon.

[0509] Embodiment 16. The method of embodiment 2, wherein the targeted portion of the pre-mRNA comprises 5′ NMD exon-intron junction or 3′ NMD exon-intron junction.

[0510] Embodiment 17. The method of embodiment 2, wherein the targeted portion of the pre-mRNA is within the NMD exon.

[0511] Embodiment 18. The method of embodiment 2, wherein the targeted portion of the pre-mRNA comprises about 5, 6, 7, 8, 9, 10, 11, 12, 13, 14, 15, 16, 17, 18, 19, 20, 21, 22, 23, 24, 25, 26, 27, 28, 29, 30, or more consecutive nucleotides of the NMD exon.

[0512] Embodiment 19. The method of any one of embodiments 1 to 18, wherein the NMD exon comprises a sequence with at least 80%, at least 90%, or 100% sequence identity to SEQ ID NO: 279.

[0513] Embodiment 20. The method of any one of embodiments 1 to 18, wherein the NMD exon comprises a sequence of SEQ ID NO: 279.

[0514] Embodiment 21. The method of embodiment 2, wherein the targeted portion of the pre-mRNA is within the nonsense-mediated RNA decay-inducing exon GRCh38/hg38: chr3 193628509 to 193628616.

[0515] Embodiment 22. The method of embodiment 2, wherein the targeted portion of the pre-mRNA is upstream or downstream of the nonsense-mediated RNA decay-inducing exon GRCh38/hg38: chr3 193628509 to 193628616.

[0516] Embodiment 23. The method of embodiment 2, wherein the targeted portion of the pre-mRNA comprises an exon-intron junction of exon GRCh38/hg38: chr3 193628509 to 193628616.

[0517] Embodiment 24. The method of any one of embodiments 1 to 23, wherein the OPA1 protein expressed from the processed mRNA is a full-length OPA1 protein or a wild-type OPA1 protein.

[0518] Embodiment 25. The method of any one of embodiments 1 to 23, wherein the OPA1 protein expressed from the processed mRNA is a functional OPA1 protein.

[0519] Embodiment 26. The method of any one of embodiments 1 to 23, wherein the OPA1 protein expressed from the processed mRNA is at least partially functional as compared to a wild-type OPA1 protein.

[0520] Embodiment 27. The method of any one of embodiments 1 to 23, wherein the OPA1 protein expressed from the processed mRNA is at least partially functional as compared to a full-length wild-type OPA1 protein.

[0521] Embodiment 28. The method of any one of embodiments 1 to 23, or 25 to 27, wherein the OPA1 protein expressed from the processed mRNA is an OPA1 protein that lacks an amino acid sequence encoded by a nucleic acid sequence with at least 80% sequence identity to SEQ ID NO: 277.

[0522] Embodiment 29. The method of any one of embodiments 1 to 28, wherein the method promotes exclusion of the NMD exon from the pre-mRNA.

[0523] Embodiment 30. The method of embodiment 29, wherein the exclusion of the NMD exon from the pre-mRNA in the cell contacted with the agent is increased by about 1.1 to about 10-fold, about 1.5 to about 10-fold, about 2 to about 10-fold, about 3 to about 10-fold, about 4 to about 10-fold, about 1.1 to about 5-fold, about 1.1 to about 6-fold, about 1.1 to about 7-fold, about 1.1 to about 8-fold, about 1.1 to about 9-fold, about 2 to about 5-fold, about 2 to about 6-fold, about 2 to about 7-fold, about 2 to about 8-fold, about 2 to about 9-fold, about 3 to about 6-fold, about 3 to about 7-fold, about 3 to about 8-fold, about 3 to about 9-fold, about 4 to about 7-fold, about 4 to about 8-fold, about 4 to about 9-fold, at least about 1.1-fold, at least about 1.5-fold, at least about 2-fold, at least about 2.5-fold, at least about 3-fold, at least about 3.5-fold, at least about 4-fold, at least about 5-fold, or at least about 10-fold, compared to in the absence of the agent.

[0524] Embodiment 31. The method of any one of embodiments 1 to 30, wherein the method results in an increase in the level of the processed mRNA in the cell.

[0525] Embodiment 32. The method of embodiment 31, wherein the level of the processed mRNA in the cell contacted with the agent is increased by about 1.1 to about 10-fold, about 1.5 to about 10-fold, about 2 to about 10-fold, about 3 to about 10-fold, about 4 to about 10-fold, about 1.1 to about 5-fold, about 1.1 to about 6-fold, about 1.1 to about 7-fold, about 1.1 to about 8-fold, about 1.1 to about 9-fold, about 2 to about 5-fold, about 2 to about 6-fold, about 2 to about 7-fold, about 2 to about 8-fold, about 2 to about 9-fold, about 3 to about 6-fold, about 3 to about 7-fold, about 3 to about 8-fold, about 3 to about 9-fold, about 4 to about 7-fold, about 4 to about 8-fold, about 4 to about 9-fold, at least about 1.1-fold, at least about 1.5-fold, at least about 2-fold, at least about 2.5-fold, at least about 3-fold, at least about 3.5-fold, at least about 4-fold, at least about 5-fold, or at least about 10-fold, compared to in the absence of the agent.

[0526] Embodiment 33. The method of any one of embodiments 1 to 32, wherein the method results in an increase in the expression of the OPA1 protein in the cell.

[0527] Embodiment 34. The method of embodiment 33, wherein a level of the OPA1 protein expressed from the processed mRNA in the cell contacted with the agent is increased by about 1.1 to about 10-fold, about 1.5 to about 10-fold, about 2 to about 10-fold, about 3 to about 10-fold, about 4 to about 10-fold, about 1.1 to about 5-fold, about 1.1 to about 6-fold, about 1.1 to about 7-fold, about 1.1 to about 8-fold, about 1.1 to about 9-fold, about 2 to about 5-fold, about 2 to about 6-fold, about 2 to about 7-fold, about 2 to about 8-fold, about 2 to about 9-fold, about 3 to about 6-fold, about 3 to about 7-fold, about 3 to about 8-fold, about 3 to about 9-fold, about 4 to about 7-fold, about 4 to about 8-fold, about 4 to about 9-fold, at least about 1.1-fold, at least about 1.5-fold, at least about 2-fold, at least about 2.5-fold, at least about 3-fold, at least about 3.5-fold, at least about 4-fold, at least about 5-fold, or at least about 10-fold, compared to in the absence of the agent.

[0528] Embodiment 35. The method of any one of embodiments 1 to 34, wherein the agent comprises an antisense oligomer with at least 80%, at least 90%, or 100% sequence identity to a sequence selected from the group consisting of SEQ ID NOs: 36, 236, 242, 250, 280-283, 288, and 290-292.

[0529] Embodiment 36. The method of any one of embodiments 1 to 34, wherein the agent further comprises a gene editing molecule.

[0530] Embodiment 37. The method of embodiment 36, wherein the gene editing molecule comprises CRISPR-Cas9.

[0531] Embodiment 38. A method of modulating expression of an OPA1 protein in a cell having a pre-mRNA that is transcribed from an OPA1 gene, wherein the pre-mRNA comprises a coding exon, the method comprising contacting an agent or a vector encoding the agent to the cell, whereby the agent promotes exclusion of the coding exon from the pre-mRNA, thereby increasing a level of a processed mRNA that is processed from the pre-mRNA and that lacks the coding exon in the cell.

[0532] Embodiment 39. The method of embodiment 38, wherein the agent:
[0533] (a) binds to a targeted portion of the pre-mRNA;
[0534] (b) modulates binding of a factor involved in splicing of the coding exon; or
[0535] (c) a combination of (a) and (b).

[0536] Embodiment 40. The method of embodiment 39, wherein the agent interferes with binding of the factor involved in splicing of the coding exon to a region of the targeted portion.

[0537] Embodiment 41. The method of embodiment 39, wherein the targeted portion of the pre-mRNA is proximal to the coding exon.

[0538] Embodiment 42. The method of embodiment 39, wherein the targeted portion of the pre-mRNA is located in an intronic region immediately upstream of the coding exon.

[0539] Embodiment 43. The method of embodiment 39, wherein the targeted portion of the pre-mRNA is within a region spanning from 100 to 50, from 90 to 50, from 80 to 50, from 70 to 50, from 60 to 50, from 60 to 40, from 60 to 30, from 60 to 20, from 60 to 10, from 49 to 1, from 39 to 1, from 29 to 1, or from 19 to 1 nucleotides upstream of 5′ end of the coding exon.

[0540] Embodiment 44. The method of embodiment 39, wherein the targeted portion of the pre-mRNA is within a region spanning from 49 to 1, from 39 to 1, from 29 to 1, or from 19 to 1 nucleotides upstream of 5′ end of the coding exon.

[0541] Embodiment 45. The method of embodiment 39, wherein the targeted portion of the pre-mRNA is located in an intronic region immediately downstream of the coding exon.

[0542] Embodiment 46. The method of embodiment 39, wherein the targeted portion of the pre-mRNA is within a region spanning from 1 to 49, from 1 to 39, from 1 to 29, from 1 to 19, from 10 to 60, from 20 to 60, from 30 to 60, from 40 to 60, from 50 to 60, from 50 to 70, from 50 to 80, from 50 to 90, or from 50 to 100 nucleotides downstream of 3′ end of the coding exon.

[0543] Embodiment 47. The method of embodiment 39, wherein the targeted portion of the pre-mRNA is within a region spanning from 1 to 49, from 1 to 39, from 1 to 29, or from 1 to 19 nucleotides downstream of 3′ end of the coding exon.

[0544] Embodiment 48. The method of embodiment 39, wherein the targeted portion of the pre-mRNA at least partially overlaps with the coding exon.

[0545] Embodiment 49. The method of embodiment 39, wherein the targeted portion of the pre-mRNA at least partially overlaps with an intron immediately upstream or immediately downstream of the coding exon.

[0546] Embodiment 50. The method of embodiment 39, wherein the targeted portion of the pre-mRNA comprises 5′ coding exon-intron junction or 3′ coding exon-intron junction.

[0547] Embodiment 51. The method of embodiment 39, wherein the targeted portion is within the coding exon of the pre-mRNA.

[0548] Embodiment 52. The method of any one of embodiments 39 to 51, wherein the coding exon is an alternatively spliced exon.

[0549] Embodiment 53. The method of any one of embodiments 39 to 52, wherein the coding exon comprises a sequence with at least 80%, at least 90%, or 100% sequence identity to SEQ ID NO: 277.

[0550] Embodiment 54. The method of any one of embodiments 39 to 52, wherein the coding exon comprises SEQ ID NO: 277.

[0551] Embodiment 55. The method of embodiment 39, wherein the targeted portion of the pre-mRNA is immediately upstream of the coding exon GRCh38/hg38: chr3 193626092 to 193626202.

[0552] Embodiment 56. The method of embodiment 39, wherein the targeted portion of the pre-mRNA is within a region spanning from 49 to 1, from 39 to 1, from 29 to 1, or from 19 to 1 nucleotides upstream of genomic site GRCh38/hg38: chr3 193626092.

[0553] Embodiment 57. The method of embodiment 39, wherein the targeted portion of the pre-mRNA is immediately downstream of the coding exon GRCh38/hg38: chr3 193626092 to 193626202.

[0554] Embodiment 58. The method of embodiment 39, wherein the targeted portion of the pre-mRNA is within a region spanning from 1 to 49, from 1 to 39, from 1 to 29, or from 1 to 19 nucleotides downstream of genomic site GRCh38/hg38: chr3 193626202.

[0555] Embodiment 59. The method of embodiment 39, wherein the targeted portion of the pre-mRNA is within the coding exon GRCh38/hg38: chr3 193626092 to 193626202.

[0556] Embodiment 60. The method of embodiment 39, wherein the targeted portion of the pre-mRNA comprises an exon-intron junction of exon GRCh38/hg38: chr3 193626092 to 193626202.

[0557] Embodiment 61. The method of embodiment 39, wherein the targeted portion comprises about 5, 6, 7, 8, 9, 10, 11, 12, 13, 14, 15, 16, 17, 18, 19, 20, 21, 22, 23, 24, 25, 26, 27, 28, 29, 30, or more consecutive nucleotides of the coding exon.

[0558] Embodiment 62. The method of embodiment 39, wherein the targeted portion of the pre-mRNA comprises a sequence with at least 80%, 85%, 90%, 95%, 97%, or 100% sequence identity to a region comprising at least 8 contiguous nucleic acids of SEQ ID NO: 277.

[0559] Embodiment 63. The method of any one of embodiments 38 to 62, wherein the exclusion of the coding exon from the pre-mRNA in the cell contacted with the agent is increased by about 1.1 to about 10-fold, about 1.5 to about 10-fold, about 2 to about 10-fold, about 3 to about 10-fold, about 4 to about 10-fold, about 1.1 to about 5-fold, about 1.1 to about 6-fold, about 1.1 to about 7-fold, about 1.1 to about 8-fold, about 1.1 to about 9-fold, about 2 to about 5-fold, about 2 to about 6-fold, about 2 to about 7-fold, about 2 to about 8-fold, about 2 to about 9-fold, about 3 to about 6-fold, about 3 to about 7-fold, about 3 to about 8-fold, about 3 to about 9-fold, about 4 to about 7-fold, about 4 to about 8-fold, about 4 to about 9-fold, at least about 1.1-fold, at least about 1.5-fold, at least about 2-fold, at least about 2.5-fold, at least about 3-fold, at least about 3.5-fold, at least about 4-fold, at least about 5-fold, or at least about 10-fold, compared to in the absence of the agent.

[0560] Embodiment 64. The method of any one of embodiments 38 to 63, wherein the method results in an increase in expression of the OPA1 protein in the cell.

[0561] Embodiment 65. The method of embodiment 64, wherein a level of the OPA1 protein expressed from the processed mRNA in the cell contacted with the agent is increased by about 1.1 to about 10-fold, about 1.5 to about 10-fold, about 2 to about 10-fold, about 3 to about 10-fold, about 4 to about 10-fold, about 1.1 to about 5-fold, about 1.1 to about 6-fold, about 1.1 to about 7-fold, about 1.1 to about 8-fold, about 1.1 to about 9-fold, about 2 to about 5-fold, about 2 to about 6-fold, about 2 to about 7-fold, about 2 to about 8-fold, about 2 to about 9-fold, about 3 to about 6-fold, about 3 to about 7-fold, about 3 to about 8-fold, about 3 to about 9-fold, about 4 to about 7-fold, about 4 to about 8-fold, about 4 to about 9-fold, at least about 1.1-fold, at least about 1.5-fold, at least about 2-fold, at least about 2.5-fold, at least about 3-fold, at least about 3.5-fold, at least about 4-fold, at least about 5-fold, or at least about 10-fold, compared to in the absence of the agent.

[0562] Embodiment 66. The method of embodiment 64, wherein a level of the OPA1 protein expressed from the processed mRNA in the cell contacted with the agent is increased by at least about 1.5-fold compared to in the absence of the agent.

[0563] Embodiment 67. The method of any one of embodiments 64 to 66, wherein the OPA1 protein expressed from the processed mRNA is a functional OPA1 protein.

[0564] Embodiment 68. The method of any one of embodiments 64 to 66, wherein the OPA1 protein expressed from the processed mRNA is at least partially functional as compared to a wild-type OPA1 protein.

[0565] Embodiment 69. The method of any one of embodiments 64 to 66, wherein the OPA1 protein expressed from the processed mRNA is at least partially functional as compared to a full-length wild-type OPA1 protein.

[0566] Embodiment 70. The method of any one of embodiments 64 to 69, wherein the OPA1 protein expressed from the processed mRNA comprises fewer proteolytic cleavage sites than an OPA1 protein encoded by a corresponding mRNA containing the coding exon.

[0567] Embodiment 71. The method of any one of embodiments 38 to 70, wherein the agent promotes exclusion of a nonsense-mediated RNA decay-inducing exon (NMD exon) from the pre-mRNA.

[0568] Embodiment 72. The method of embodiment 71, wherein the NMD exon comprises a sequence with at least 80%, at least 90%, or 100% sequence identity to SEQ ID NO: 279.

[0569] Embodiment 73. The method of embodiment 71, wherein the NMD exon comprises a sequence of SEQ ID NO: 279.

[0570] Embodiment 74. The method of any one of embodiments 64 to 73, wherein the OPA1 protein expressed from the processed mRNA comprises fewer proteolytic cleavage sites than an OPA1 protein encoded by a corresponding mRNA containing the coding exon.

[0571] Embodiment 75. The method of any one of embodiments 38 to 74, wherein the agent comprises an antisense oligomer with at least 80%, at least 90%, or 100% sequence identity to a sequence selected from the group consisting of SEQ ID NOs: 227-242, 250, 280-283, 288, and 290-292.

[0572] Embodiment 76. The method of any one of embodiments 38 to 74, wherein the agent comprises a gene editing molecule.

[0573] Embodiment 77. The method of embodiment 76, wherein the gene editing molecule comprises CRISPR-Cas9.

[0574] Embodiment 78. A method of modulating expression of an OPA1 protein in a cell having a pre-mRNA that is transcribed from an OPA1 gene, wherein the pre-mRNA comprises a coding exon, the method comprising contacting an agent or a vector encoding the agent to the cell,
[0575] wherein the agent comprises an antisense oligomer that binds to:
[0576] (a) a targeted portion of the pre-mRNA within an intronic region immediately upstream of a 5′ end of the coding exon of the pre-mRNA; or
[0577] (b) a targeted portion of the pre-mRNA within an intronic region immediately downstream of a 3′ end of the coding exon of the pre-mRNA;
[0578] whereby the agent increases a level of a processed mRNA that is processed from the pre-mRNA and that contains the coding exon in the cell.

[0579] Embodiment 79. The method of embodiments 78, wherein the coding exon is an alternatively spliced exon.

[0580] Embodiment 80. The method of embodiments 78 or 79, wherein the method promotes inclusion of the coding exon in the processed mRNA during splicing of the pre-mRNA in the cell.

[0581] Embodiment 81. The method of any one of embodiments 78 to 80, wherein the target portion of the pre-mRNA is within a region spanning from 100 to 50, from 100 to 60, from 100 to 70, from 100 to 80, or from 100 to 90 nucleotides upstream of a 5′ end of the coding exon.

[0582] Embodiment 82. The method of any one of embodiments 78 to 80, wherein the target portion of the pre-mRNA is within a region spanning from 40 to 100, from 50 to 100, from 60 to 100, from 70 to 100, from 80 to 100, or from 90 to 100 nucleotides downstream of a 3′ end of the coding exon.

[0583] Embodiment 83. The method of any one of embodiments 78 to 80, wherein the coding exon comprises a sequence with at least 80%, at least 90%, or 100% sequence identity to SEQ ID NO: 277.

[0584] Embodiment 84. The method of any one of embodiments 78 to 80, wherein the coding exon comprises SEQ ID NO: 277.

[0585] Embodiment 85. The method of any one of embodiments 78 to 80, wherein the targeted portion of the pre-mRNA is within a region spanning from 100 to 50, from 100 to 60, from 100 to 70, from 100 to 80, or from 100 to 90 nucleotides upstream of genomic site GRCh38/hg38: chr3 193626092.

[0586] Embodiment 86. The method of any one of embodiments 78 to 80, wherein the targeted portion of the pre-mRNA is within a region spanning from 40 to 100, from 50 to 100, from 60 to 100, from 70 to 100, from 80 to 100, or from 90 to 100 nucleotides downstream of genomic site GRCh38/hg38: chr3 193626202.

[0587] Embodiment 87. The method of any one of embodiments 78 to 86, wherein the inclusion of the coding exon in the processed mRNA in the cell contacted with the agent is increased by about 1.1 to about 10-fold, about 1.5 to about 10-fold, about 2 to about 10-fold, about 3 to about 10-fold, about 4 to about 10-fold, about 1.1 to about 5-fold, about 1.1 to about 6-fold, about 1.1 to about 7-fold, about 1.1 to about 8-fold, about 1.1 to about 9-fold, about 2 to about 5-fold, about 2 to about 6-fold, about 2 to about 7-fold, about 2 to about 8-fold, about 2 to about 9-fold, about 3 to about 6-fold, about 3 to about 7-fold, about 3 to about 8-fold, about 3 to about 9-fold, about 4 to about 7-fold, about 4 to about 8-fold, about 4 to about 9-fold, at least about 1.1-fold, at least about 1.5-fold, at least about 2-fold, at least about 2.5-fold, at least about 3-fold, at least about 3.5-fold, at least about 4-fold, at least about 5-fold, or at least about 10-fold, compared to in the absence of the agent.

[0588] Embodiment 88. The method of any one of embodiments 78 to 87, wherein the agent comprises an antisense oligomer with at least 80%, at least 90%, or 100% sequence identity to SEQ ID NO: 267.

[0589] Embodiment 89. A method of modulating expression of a target protein in a cell having a pre-mRNA transcribed from a gene that encodes the target protein, wherein the pre-mRNA comprises a coding exon and a nonsense-mediated RNA decay-inducing exon (NMD exon), the method comprising contacting an agent or a vector encoding the agent to the cell,
[0590] wherein the agent promotes exclusion of both the coding exon and the NMD exon from the pre-mRNA, thereby increasing a level of a processed mRNA that is processed from the pre-mRNA and that lacks both the NMD exon and the coding exon in the cell.

[0591] Embodiment 90. The method of embodiment 89, wherein the agent:
[0592] (a) binds to a targeted portion of the pre-mRNA;
[0593] (b) modulates binding of a factor involved in splicing of the coding exon, the NMD exon, or both; or
[0594] (c) a combination of (a) and (b).

[0595] Embodiment 91. The method of embodiment 90, wherein the agent interferes with binding of the factor involved in splicing of the coding exon, the NMD exon, or both, to a region of the targeted portion.

[0596] Embodiment 92. The method of any one of embodiments 89 to 91, wherein the NMD exon is within an intronic region adjacent to the coding exon.

[0597] Embodiment 93. The method of embodiment 92, wherein the NMD exon is within an intronic region immediately upstream of the coding exon.

[0598] Embodiment 94. The method of embodiment 92, wherein the NMD exon is within an intronic region immediately downstream of the coding exon.

[0599] Embodiment 95. The method of any one of embodiments 90 to 94, wherein the targeted portion of the pre-mRNA is proximal to the coding exon.

[0600] Embodiment 96. The method of any one of embodiments 90 to 94, wherein the targeted portion of the pre-mRNA is located in an intronic region immediately upstream of the coding exon.

[0601] Embodiment 97. The method of any one of embodiments 90 to 94, wherein the targeted portion of the pre-mRNA is located in an intronic region immediately downstream of the coding exon.

[0602] Embodiment 98. The method of any one of embodiments 90 to 94, wherein the targeted portion of the pre-mRNA is located within the coding exon.

[0603] Embodiment 99. The method of any one of embodiments 90 to 94, wherein the targeted portion of the pre-mRNA is within a region spanning from 49 to 1, from 39 to 1, from 29 to 1, or from 19 to 1 nucleotides upstream of 5′ end of the coding exon.

[0604] Embodiment 100. The method of any one of embodiments 90 to 94, wherein the targeted portion of the pre-mRNA is within a region spanning from 100 nucleotides upstream of the coding exon to 100 nucleotides downstream of the coding exon.

[0605] Embodiment 101. The method of any one of embodiments 89 to 100, wherein the coding exon is an alternatively spliced exon.

[0606] Embodiment 102. The method of any one of embodiments 89 to 101, wherein the coding exon comprises a sequence with at least 80%, at least 90%, or 100% sequence identity to SEQ ID NO: 277.

[0607] Embodiment 103. The method of any one of embodiments 89 to 101, wherein the coding exon comprises SEQ ID NO: 277.

[0608] Embodiment 104. The method of embodiment 90, wherein the targeted portion of the pre-mRNA is immediately upstream of the coding exon GRCh38/hg38: chr3 193626092 to 193626202.

[0609] Embodiment 105. The method of embodiment 90, wherein the targeted portion of the pre-mRNA is immediately downstream of the coding exon GRCh38/hg38: chr3 193626092 to 193626202.

[0610] Embodiment 106. The method of any one of embodiments 90 to 94, wherein the targeted portion of the pre-mRNA is within a region spanning from 49 to 1, from 39 to 1, from 29 to 1, or from 19 to 1 nucleotides upstream of GRCh38/hg38: chr3 193626092.

[0611] Embodiment 107. The method of embodiment 90, wherein the targeted portion of the pre-mRNA is within a region spanning from 100 nucleotides upstream of genomic site GRCh38/hg38: chr3 193626092. to 100 nucleotides downstream of genomic site GRCh38/hg38: chr3 193626202.

[0612] Embodiment 108. The method of embodiment 90, wherein the targeted portion of the pre-mRNA is within the coding exon GRCh38/hg38: chr3 193626092 to 193626202.

[0613] Embodiment 109. The method of embodiment 90, wherein the targeted portion of the pre-mRNA comprises an exon-intron junction of the coding exon GRCh38/hg38: chr3 193626092 to 193626202.

[0614] Embodiment 110. The method of embodiment 90, wherein the targeted portion comprises about 1, 2, 3, 4, 5, 6, 7, 8, 9, 10, 11, 12, 13, 14, 15, 16, 17, 18, 19, 20, 21, 22, 23, 24, 25, 26, 27, 28, 29, 30, or more consecutive nucleotides of the coding exon.

[0615] Embodiment 111. The method of embodiment 90, wherein the targeted portion of the pre-mRNA is proximal to the NMD exon.

[0616] Embodiment 112. The method of embodiment 90, wherein the targeted portion of the pre-mRNA is located in an intronic region immediately upstream of the NMD exon.

[0617] Embodiment 113. The method of embodiment 90, wherein the targeted portion of the pre-mRNA is located in an intronic region immediately downstream of the NMD exon.

[0618] Embodiment 114. The method of embodiment 90, wherein the targeted portion of the pre-mRNA is located within the NMD exon.

[0619] Embodiment 115. The method of embodiment 90, wherein the targeted portion of the pre-mRNA is within a region spanning from 100 nucleotides upstream of the NMD exon to 100 nucleotides downstream of the NMD exon.

[0620] Embodiment 116. The method of any one of embodiments 89 to 115, wherein the NMD exon comprises a sequence with at least 80%, at least 90%, or 100% sequence identity to SEQ ID NO: 279.

[0621] Embodiment 117. The method of embodiment 89, wherein the NMD exon comprises SEQ ID NO: 279.

[0622] Embodiment 118. The method of embodiment 90, wherein the targeted portion of the pre-mRNA is immediately upstream of the NMD exon GRCh38/hg38: chr3 193628509 to 193628616.

[0623] Embodiment 119. The method of embodiment 90, wherein the targeted portion of the pre-mRNA is immediately downstream of the NMD exon GRCh38/hg38: chr3 193628509 to 193628616.

[0624] Embodiment 120. The method of embodiment 90, wherein the targeted portion of the pre-mRNA is within a region spanning from 100 nucleotides upstream of genomic site GRCh38/hg38: chr3 193628509 to 100 nucleotides downstream of genomic site GRCh38/hg38: chr3 193628616.

[0625] Embodiment 121. The method of embodiment 90, wherein the targeted portion of the pre-mRNA is within the NMD exon GRCh38/hg38: chr3 193628509 to 193628616.

[0626] Embodiment 122. The method of embodiment 90, wherein the targeted portion of the pre-mRNA comprises an exon-intron junction of the NMD exon GRCh38/hg38: chr3 193628509 to 193628616.

[0627] Embodiment 123. The method of embodiment 90, wherein the targeted portion comprises about 1, 2, 3, 4, 5, 6, 7, 8, 9, 10, 11, 12, 13, 14, 15, 16, 17, 18, 19, 20, 21, 22, 23, 24, 25, 26, 27, 28, 29, 30, or more consecutive nucleotides of the NMD exon.

[0628] Embodiment 124. The method of any one of embodiments 89 to 123, wherein the exclusion of the coding exon from the pre-mRNA in the cell contacted with the agent is increased by about 1.1 to about 10-fold, about 1.5 to about 10-fold, about 2 to about 10-fold, about 3 to about 10-fold, about 4 to about 10-fold, about 1.1 to about 5-fold, about 1.1 to about 6-fold, about 1.1 to about 7-fold, about 1.1 to about 8-fold, about 1.1 to about 9-fold, about 2 to about 5-fold, about 2 to about 6-fold, about 2 to about 7-fold, about 2 to about 8-fold, about 2 to about 9-fold, about 3 to about 6-fold, about 3 to about 7-fold, about 3 to about 8-fold, about 3 to about 9-fold, about 4 to about 7-fold, about 4 to about 8-fold, about 4 to about 9-fold, at least about 1.1-fold, at least about 1.5-fold, at least about 2-fold, at least about 2.5-fold, at least about 3-fold, at least about 3.5-fold, at least about 4-fold, at least about 5-fold, or at least about 10-fold, compared to in the absence of the agent.

[0629] Embodiment 125. The method of any one of embodiments 89 to 124, wherein the exclusion of the NMD exon from the pre-mRNA in the cell contacted with the agent is increased by about 1.1 to about 10-fold, about 1.5 to about 10-fold, about 2 to about 10-fold, about 3 to about 10-fold, about 4 to about 10-fold, about 1.1 to about 5-fold, about 1.1 to about 6-fold, about 1.1 to about 7-fold, about 1.1 to about 8-fold, about 1.1 to about 9-fold, about 2 to about 5-fold, about 2 to about 6-fold, about 2 to about 7-fold, about 2 to about 8-fold, about 2 to about 9-fold, about 3 to about 6-fold, about 3 to about 7-fold, about 3 to about 8-fold, about 3 to about 9-fold, about 4 to about 7-fold, about 4 to about 8-fold, about 4 to about 9-fold, at least about 1.1-fold, at least about 1.5-fold, at least about 2-fold, at least about 2.5-fold, at least about 3-fold, at least about 3.5-fold, at least about 4-fold, at least about 5-fold, or at least about 10-fold, compared to in the absence of the agent.

[0630] Embodiment 126. The method of any one of embodiments 89 to 125, wherein the agent results in an increase in the level of the processed mRNA in the cell.

[0631] Embodiment 127. The method of embodiment 126, wherein the level of the processed mRNA in the cell contacted with the agent is increased by about 1.1 to about 10-fold, about 1.5 to about 10-fold, about 2 to about 10-fold, about 3 to about 10-fold, about 4 to about 10-fold, about 1.1 to about 5-fold, about 1.1 to about 6-fold, about 1.1 to about 7-fold, about 1.1 to about 8-fold, about 1.1 to about 9-fold, about 2 to about 5-fold, about 2 to about 6-fold, about 2 to about 7-fold, about 2 to about 8-fold, about 2 to about 9-fold, about 3 to about 6-fold, about 3 to about 7-fold, about 3 to about 8-fold, about 3 to about 9-fold, about 4 to about 7-fold, about 4 to about 8-fold, about 4 to about 9-fold, at least about 1.1-fold, at least about 1.5-fold, at least about 2-fold, at least about 2.5-fold, at least about 3-fold, at least about 3.5-fold, at least about 4-fold, at least about 5-fold, or at least about 10-fold, compared to in the absence of the agent.

[0632] Embodiment 128. The method of any one of embodiments 89 to 127, wherein the method results in an increase in expression of the target protein in the cell.

[0633] Embodiment 129. The method of embodiment 128, wherein a level of the target protein expressed from the processed mRNA in the cell contacted with the agent is increased by about 1.1 to about 10-fold, about 1.5 to about 10-fold, about 2 to about 10-fold, about 3 to about 10-fold, about 4 to about 10-fold, about 1.1 to about 5-fold, about 1.1 to about 6-fold, about 1.1 to about 7-fold, about 1.1 to about 8-fold, about 1.1 to about 9-fold, about 2 to about 5-fold, about 2 to about 6-fold, about 2 to about 7-fold, about 2 to about 8-fold, about 2 to about 9-fold, about 3 to about 6-fold, about 3 to about 7-fold, about 3 to about 8-fold, about 3 to about 9-fold, about 4 to about 7-fold, about 4 to about 8-fold, about 4 to about 9-fold, at least about 1.1-fold, at least about 1.5-fold, at least about 2-fold, at least about 2.5-fold, at least about 3-fold, at least about 3.5-fold, at least about 4-fold, at least about 5-fold, or at least about 10-fold, compared to in the absence of the agent.

[0634] Embodiment 130. The method of any one of embodiments 89 to 128, wherein the target protein is an OPA1 protein.

[0635] Embodiment 131. The method of embodiment 130, wherein a level of the OPA1 protein expressed from the processed mRNA in the cell contacted with the agent is increased by at least about 1.5-fold compared to in the absence of the agent.

[0636] Embodiment 132. The method of embodiment 130, wherein the OPA1 protein expressed from the processed mRNA is a functional OPA1 protein.

[0637] Embodiment 133. The method of embodiment 130, wherein the OPA1 protein expressed from the processed mRNA is at least partially functional as compared to a wild-type OPA1 protein.

[0638] Embodiment 134. The method of embodiment 130, wherein the OPA1 protein expressed from the processed mRNA is at least partially functional as compared to a full-length wild-type OPA1 protein.

[0639] Embodiment 135. The method of any one of embodiments 89 to 127, wherein the agent comprises an antisense oligomer with at least 80%, at least 90%, or 100% sequence identity to a sequence selected from the group consisting of SEQ ID NOs: 236, 242, 250, 280-283, 288, and 290-292.

[0640] Embodiment 136. The method of any one of embodiments 78 to 135, wherein the agent comprises a gene editing molecule.

[0641] Embodiment 137. The method of embodiment 136, wherein the gene editing molecule comprises CRISPR-Cas9.

[0642] Embodiment 138. The method of any one of embodiments 1 to 75 or 78 to 135, wherein the agent is an antisense oligomer (ASO) and wherein the antisense oligomer comprises a backbone modification comprising a phosphorothioate linkage or a phosphorodiamidate linkage.

[0643] Embodiment 139. The method of any one of embodiments 1 to 75 or 78 to 138, wherein the agent is an antisense oligomer (ASO) and wherein the antisense oligomer comprises a phosphorodiamidate morpholino, a locked nucleic acid, a peptide nucleic acid, a 2′-O-methyl moiety, a 2′-Fluoro moiety, or a 2′-O-methoxyethyl moiety.

[0644] Embodiment 140. The method of any one of embodiments 1 to 75 or 78 to 139, wherein the therapeutic agent is an antisense oligomer (ASO) and wherein the antisense oligomer comprises at least one modified sugar moiety.

[0645] Embodiment 141. The method of embodiment 140, wherein each sugar moiety is a modified sugar moiety.

[0646] Embodiment 142. The method of any one of embodiments 1 to 75 or 78 to 141, wherein the agent is an antisense oligomer (ASO) and wherein the antisense oligomer consists of from 8 to 50 nucleobases, 8 to 40 nucleobases, 8 to 35 nucleobases, 8 to 30 nucleobases, 8 to 25 nucleobases, 8 to 20 nucleobases, 8 to 15 nucleobases, 9 to 50 nucleobases, 9 to 40 nucleobases, 9 to 35 nucleobases, 9 to 30 nucleobases, 9 to 25 nucleobases, 9 to 20 nucleobases, 9 to 15 nucleobases, 10 to 50 nucleobases, 10 to 40 nucleobases, 10 to 35 nucleobases, 10 to 30 nucleobases, 10 to 25 nucleobases, 10 to 20 nucleobases, 10 to 15 nucleobases, 11 to 50 nucleobases, 11 to 40 nucleobases, 11 to 35 nucleobases, 11 to 30 nucleobases, 11 to 25 nucleobases, 11 to 20 nucleobases, 11 to 15 nucleobases, 12 to 50 nucleobases, 12 to 40 nucleobases, 12 to 35 nucleobases, 12 to 30 nucleobases, 12 to 25 nucleobases, 12 to 20 nucleobases, or 12 to 15 nucleobases.

[0647] Embodiment 143. The method of any one of embodiments 1 to 142, wherein the vector comprises a viral vector encoding the agent.

[0648] Embodiment 144. The method of embodiment 143, wherein the viral vector comprises an adenoviral vector, adeno-associated viral (AAV) vector, lentiviral vector, Herpes Simplex Virus (HSV) viral vector, or retroviral vector.

[0649] Embodiment 145. The method of any one of embodiments 1 to 144, wherein the method further comprises assessing mRNA level or expression level of the OPA1 protein.

[0650] Embodiment 146. The method of any one of embodiments 1 to 145, wherein the agent is a therapeutic agent.

[0651] Embodiment 147. A pharmaceutical composition comprising the therapeutic agent of embodiment 146 or a vector encoding the therapeutic agent of embodiment 146, and a pharmaceutically acceptable excipient.

[0652] Embodiment 148. A pharmaceutical composition, comprising a therapeutic agent or a vector encoding a therapeutic agent, and a pharmaceutically acceptable excipient, wherein the therapeutic agent comprises an antisense oligomer with at least 80% sequence identity to a sequence selected from the group consisting of SEQ ID NOs: 6-275 and 280-299.

[0653] Embodiment 149. The pharmaceutical composition of embodiment 148, wherein the therapeutic agent comprises an antisense oligomer with at least 80%, at least 90%, or 100% sequence identity to a sequence selected from the group consisting of SEQ ID NOs: 227-242 and 250.

[0654] Embodiment 150. The pharmaceutical composition of embodiment 148, wherein the therapeutic agent comprises an antisense oligomer with at least 80%, at least 90%, or 100% sequence identity to SEQ ID NO: 267.

[0655] Embodiment 151. The pharmaceutical composition of embodiment 148, wherein the therapeutic agent comprises an antisense oligomer with at least 80%, at least 90%, or 100% sequence identity to a sequence selected from the group consisting of SEQ ID NOs: 36, 236, 242, 250, and 280-299.

[0656] Embodiment 152. A composition, comprising an antisense oligomer with at least 80% sequence identity to a sequence selected from the group consisting of SEQ ID NOs: 6-275 and 280-299, wherein the antisense oligomer comprises a backbone modification, a sugar moiety modification, or a combination thereof.

[0657] Embodiment 153. The composition of embodiment 152, wherein the antisense oligomer has at least 80%, at least 90%, or 100% sequence identity to a sequence selected from the group consisting of SEQ ID NOs: 227-242 and 250.

[0658] Embodiment 154. The composition of embodiment 152, wherein the antisense oligomer has at least 80%, at least 90%, or 100% sequence identity to SEQ ID NO: 267.

[0659] Embodiment 155. The composition of embodiment 152, wherein the antisense oligomer has at least 80%, at least 90%, or 100% sequence identity to a sequence selected from the group consisting of SEQ ID NOs: 36, 236, 242, 250, and 280-299.

[0660] Embodiment 156. A pharmaceutical composition, comprising a therapeutic agent or a vector encoding the therapeutic agent, and a pharmaceutically acceptable excipient, wherein the therapeutic agent promotes exclusion of a coding exon from a pre-mRNA, thereby increasing a level of a processed mRNA that is processed from the pre-mRNA and that lacks the coding exon in a cell, wherein the pre-mRNA is transcribed from an OPA1 gene and that comprises the coding exon.

[0661] Embodiment 157. A pharmaceutical composition, comprising a therapeutic agent or a vector encoding the therapeutic agent, and a pharmaceutically acceptable excipient, wherein the therapeutic agent comprises an antisense oligomer that binds to a pre-mRNA that is transcribed from an OPA1 gene in a cell, wherein the antisense oligomer binds to:
[0662] (a) a targeted portion of the pre-mRNA within an intronic region immediately upstream of a 5′ end of the coding exon of the pre-mRNA; or
[0663] (b) a targeted portion of the pre-mRNA within an intronic region immediately downstream of a 3′ end of the coding exon of the pre-mRNA;
[0664] whereby the therapeutic agent increases a level of a processed mRNA that is processed from the pre-mRNA and that contains the coding exon in the cell.

[0665] Embodiment 158. A pharmaceutical composition, comprising a therapeutic agent or a vector encoding the therapeutic agent, and a pharmaceutically acceptable excipient, wherein the therapeutic agent promotes exclusion of both a coding exon and a nonsense-mediated RNA decay-inducing exon (NMD exon) from a pre-mRNA, thereby increasing a level of a processed mRNA that is processed from the pre-mRNA and that lacks the coding exon and the NMD exon in a cell, wherein the pre-mRNA is transcribed from an OPA1 gene in the cell and comprises the coding exon and the NMD exon.

[0666] Embodiment 159. The pharmaceutical composition of any one of embodiments 147 to 158, wherein the pharmaceutical composition is formulated for intracerebroventricular injection, intraperitoneal injection, intramuscular injection, intrathecal injection, subcutaneous injection, oral administration, synovial injection, intravitreal administration, subretinal injection, topical application, implantation, or intravenous injection.

[0667] Embodiment 160. The pharmaceutical composition of any one of embodiments 147 to 158, wherein the pharmaceutical composition is formulated for intravitreal injection.

[0668] Embodiment 161. The pharmaceutical composition of any one of embodiments 147 to 160, wherein the pharmaceutical composition further comprises a second therapeutic agent.

[0669] Embodiment 162. The pharmaceutical composition of embodiment 161, wherein the second therapeutic agent comprises a small molecule.

[0670] Embodiment 163. The pharmaceutical composition of embodiment 161, wherein the second therapeutic agent comprises an antisense oligomer.

[0671] Embodiment 164. The pharmaceutical composition of embodiment 161, wherein the second therapeutic agent corrects intron retention.

[0672] Embodiment 165. The pharmaceutical composition or composition of any one of embodiments 147 to 160, wherein the antisense oligomer is selected from the group consisting of Compound ID NOs: 1-303.

[0673] Embodiment 166. A method of treating or reducing the likelihood of developing a disease or condition in a subject in need thereof by modulating expression of an OPA1 protein in a cell of the subject, comprising contacting to cells of the subject the therapeutic agent of any one of embodiments 147 to 165.

[0674] Embodiment 167. The method of embodiment 166, wherein the disease or condition is associated with a loss-of-function mutation in an OPA1 gene.

[0675] Embodiment 168. The method of embodiment 166 or 167, wherein the disease or condition is associated with haploinsufficiency of the OPA1 gene, and wherein the subject has a first allele encoding a functional OPA1 protein, and a second allele from which the OPA1 protein is not produced or produced at a reduced level, or a second allele encoding a nonfunctional OPA1 protein or a partially functional OPA1 protein.

[0676] Embodiment 169. The method of any one of embodiments 166 to 168, wherein the disease or condition comprises an eye disease or condition.

[0677] Embodiment 170. The method of any one of embodiments 166 to 168, wherein the disease or condition comprises ADOA-plus syndrome; a mitochondrial disorder; glaucoma; normal tension glaucoma; Charcot-Marie-Tooth disease; mitochondria dysfunction; diabetic retinopathy; age-related macular degeneration; retinal ganglion cell death; mitochondrial fission-mediated mitochondrial dysfunction; progressive external ophthalmoplegia; deafness; ataxia; motor neuropathy; sensory neuropathy; myopathy; Behr syndrome; brain dysfunction; encephalopathy; peripheral neuropathy; fatal infantile mitochondrial encephalomyopathy; hypertrophic cardiomyopathy; spastic ataxic syndrome; sensory motor peripheral neuropathy; hypotonia; gastrointestinal dysmotility and dysphagia; optic atrophy; optic atrophy plus syndrome; Mitochondrial DNA depletion syndrome 14; late-onset cardiomyopathy; diabetic cardiomyopathy; Alzheimer's Disease; focal segmental glomerulosclerosis; kidney disease; Huntington's Disease; cognitive function decline in healthy aging; Prion diseases; late onset dementia and parkinsonism; mitochondrial myopathy; Leigh syndrome; Friedreich's ataxia; Parkinson's disease; MELAS (Mitochondrial encephalomyopathy, lactic acidosis, and stroke-like episodes); pyruvate dehydrogenase complex deficiency; chronic kidney disease; Leber's hereditary optic neuropathy; obesity; age-related systemic neurodegeneration; skeletal muscle atrophy; heart and brain ischemic damage; massive liver apoptosis; NARP (neuropathy, ataxia, retinitis pigmentosa); MERRF (myoclonic epilepsy and ragged red fibers); Pearsons/Kerns-Sayre syndrome; MIDD (maternally inherited diabetes and deafness); mitochondrial trifunctional protein deficiency; Fuchs corneal endothelial dystrophy; macular telangiectasia; retinitis pigmentosa; Leber congenital amaurosis; inherited maculopathy; Stargardt disease; or Sorsby fundus dystrophy.

[0678] Embodiment 171. The method of any one of embodiments 166 to 168, wherein the disease or condition comprises Optic atrophy type 1.

[0679] Embodiment 172. The method of any one of embodiments 166 to 168, wherein the disease or condition comprises autosomal dominant optic atrophy (ADOA).

[0680] Embodiment 173. The method of embodiment 166 or 167, wherein the disease or condition is associated with an autosomal recessive mutation of OPA1 gene, wherein the subject has a first allele encoding from which:
[0681] (i) OPA1 protein is not produced or produced at a reduced level compared to a wild-type allele; or
[0682] (ii) the OPA1 protein produced is nonfunctional or partially functional compared to a wild-type allele, and a second allele from which:
[0683] (iii) the OPA1 protein is produced at a reduced level compared to a wild-type allele and the OPA1 protein produced is at least partially functional compared to a wild-type allele; or
[0684] (iv) the OPA1 protein produced is partially functional compared to a wild-type allele.

[0685] Embodiment 174. The method of any one of embodiments 166 to 173, wherein the subject is a human.

[0686] Embodiment 175. The method of any one of embodiments 166 to 173, wherein the subject is a non-human animal.

[0687] Embodiment 176. The method of any one of embodiments 166 to 173, wherein the subject is a fetus, an embryo, or a child.

[0688] Embodiment 177. The method of any one of embodiments 166 to 173, wherein the cells are ex vivo.

[0689] Embodiment 178. The method of any one of embodiments 166 to 173, wherein the therapeutic agent is administered by intracerebroventricular injection, intraperitoneal injection, intramuscular injection, intrathecal injection, subcutaneous injection, oral administration, synovial injection, intravitreal administration, subretinal injection, topical application, implantation, or intravenous injection.

[0690] Embodiment 179. The method of any one of embodiments 166 to 173, wherein the therapeutic agent is administered by intravitreal injection.

[0691] Embodiment 180. The method of any one of embodiments 166 to 179, wherein the method treats the disease or condition.

### EXAMPLES

[0692] The present disclosure will be more specifically illustrated by the following Examples. However, it should be understood that the present disclosure is not limited by these examples in any manner.

### Example 1.1: Effects of ASOs on Protein Expression Evaluated by Immunoblotting

[0693] In one experiment, a microwalk was conducted to test exemplary ASOs that have sequences listed in Table 8, which are designed to hybridize to at least a portion of the 5′ UTR of OPA1 processed mRNA transcript. HEK293 cells were transfected with exemplary 2′-MOE ASOs with PS backbone using Lipofectamine RNAiMax (Invitrogen: 13778150). Three days later, total protein lysate was extracted with RIPA buffer from the treated cells and OPA1 protein detection was conducted by Jess chemiluminescent immunoblotting. 0.3 ug of total protein was loaded to the Jess 12-230 kDa cartridge (ProteinSimple: SM-W001) and blotted with anti-OPA1 antibody (Abcam: ab119685) diluted to 1:80. The signal of OPA1 was normalized to total protein in each lane and fold-change was calculated and plotted by normalization to the cells not treated with any of the ASOs (“No-ASO control”). FIG. 1 is a bar graph depicting the fold change of OPA1 protein level in the cells treated with some of the exemplary ASOs: ASO-U1 to ASO-U42, as well as a positive control ASO, a negative control (OPA1 siRNA), and No-ASO control. Among the tested ASOs, at least ASO-U22, ASO-U29, ASO-U33, ASO-U34, ASO-U35, ASO-U36, ASO-U37, ASO-U38, ASO-U39, and ASO-U40 were shown to lead to an increase in OPA protein level in the treated cells as compared to the No-ASO control.

### Example 1.2: Effects of ASOs on Structure of OPA1 Processed mRNA Transcript

[0694] The secondary structure of an exemplary OPA1 processed mRNA transcript can be computationally simulated using available software tools. In one case, the secondary structure of the region covering the 5′ UTR and exon 1 of OPA1 transcript ENST00000361908 is computationally determined as shown in FIG. 2A using RNAFold version 2.4.18 with default parameters. As illustrated in the figure, based on this simulation, the 5′ UTR has a structured canonical ATG (an example of the “main start codon” disclosed herein) and an unstructured upstream ATG (an example of the “upstream start codon” disclosed herein), a G-quad motif, in which all 4 G-repeats are structured. In another case, the secondary structure of the region covering the 5′ UTR and exon 1 of OPA1 transcript ENST00000361908 is computationally determined as shown in FIG. 3 using MXFold2 with default parameters. As illustrated in the figure, based on this simulation, the 5′ UTR also has a structured canonical ATG and an unstructured upstream ATG, a G-quad motif, in which all 4 G-repeats are structured.

[0695] Based on computational structural simulation, various changes in the secondary structure of the mRNA transcript were found to be induced upon binding with some of the exemplary ASOs. The following simulations were conducted using RNAFold version 2.4.18 with default parameters. Based on one computational simulation, ASO-U22 and ASO-U35 were found to relax the structured main start codon (e.g., canonical ATG) from 3 pairing to one pairing (from 3 nucleotides being paired to one nucleotide being paired), while ASO-U33 and ASO-U34 were found to relax the structured main start codon (e.g., canonical ATG) from 3 pairings to 2 pairings. FIGS. 4-5 show the secondary structures of the 5′UTR and main start codon (e.g., canonical ATG) region of the OPA1 processed mRNA upon binding with ASO-U35 and ASO-U34, respectively. Based on another computational simulation, ASO-U33 was found to convert an unstructured upstream start codon (e.g., upstream ATG) to structured in all 3 base pairs, as shown in FIG. 6. Based on another computational simulation, ASO-U36 and ASO-U37 were found to remove the secondary structure one of the structured G-repeats in the G-quad motif (G-quad-4), ASO-U35 was found to remove the secondary structure in two structured G-repeats in the G-quad motif (G-quad-3 and G-quad-4), and ASO-U33 and ASO-U34 were found to remove the secondary structure in two structured G-repeats in the G-quad motif (G-quad-2 and G-quad-3). FIGS. 7-9 show the removal of the secondary structure in the G-repeats of the G-quad motif of the 5′ UTR of the OPA1 processed mRNA upon binding with ASO-U37, ASO-U35, and ASO-U33, respectively. Based on another computational simulation, ASO-U38, ASO-U39, and ASO-U40 were found to relax the secondary structure of one G-repeat in the G-quad motif (G-quad-4) from 4-base pairing to 3-base pairing. FIG. 10 shows the secondary structure of the region covering 5′ UTR and main start codon of the OPA1 processed mRNA upon binding with ASO-U39.

### Example 1.3: OPA1 5′-UTR-Luciferase Assay

[0696] This example illustrates the setup of OPA1 5′-UTR-luciferase assay that was used to examine the effect of exemplary agents on the translation of OPA1 mRNA.

[0697] 5′-UTR regions of OPA1 processed mRNA transcripts are shown in FIG. 40, with overlaying gray boxes indicating start codons of upstream open reading frames and the main start codon (the rightmost “ATG” shown on the top of the figure).

[0698] Two constructs can be used for an OPA1 5′-UTR-luciferase assay: OPA1 5′-UTR-Fluc construct and Rluc construct. The OPA1 5′-UTR-Fluc DNA construct contains, from 5′ end to 3′ end, CMV enhancer, CMV promoter, sequence coding for 5′-UTR of OPA1 mRNA, and coding sequence for Firefly luciferase (Fluc or Luc2P). The Rluc construct contains, from 5′ end to 3′ end, SV40 promoter, chimeric intron, T7 promoter, and coding sequence for Renilla luciferase (Rluc). In this assay, expression of Firefly luciferase can indicate the expression level of Firefly luciferase under the modulation by the OPA1 5′-UTR, while expression of Renilla luciferase can be used as a loading control so that the ratio of Firefly luciferase signal versus Renilla luciferase signal (FL/RL ratio) can indicate the regulation of translation of OPA1 mRNA by its 5′-UTR.

### Example 2.1: Identification of NMD-Inducing Exon Inclusion Events in Transcripts by RNAseq Using Next-Generation Sequencing

[0699] Whole-transcriptome shotgun sequencing is carried out using next-generation sequencing to reveal a snapshot of transcripts produced by the genes described herein to identify NMD exon inclusion events. For this purpose, polyA+RNA from nuclear and cytoplasmic fractions of human cells is isolated and DNA libraries are constructed using Illumina's TruSeq Stranded mRNA library Prep Kit. The libraries are pair-end sequenced resulting in 100-nucleotide reads that are mapped to the human genome (February 2009, GRCh37/hg19 assembly). FIGS. 12 and 13 depict identification of different exemplary nonsense-mediated mRNA decay (NMD)-inducing exons in various genes.

[0700] Exemplary genes and intron sequences are summarized in Table 1.1 and Table 1.2 (SEQ ID NOs indicate the corresponding nucleotide sequences represented by the Gene ID Nos). Exemplary mature mRNA sequences and 5′ UTR sequences are summarized in Table 1.3 and Table 1.4. Exemplary target protein sequences are summarized in Table 2. The sequence for each intron is summarized in Table 3 and Table 4. Table 5 lists sequences of OPA1 antisense oligomers of this disclosure.

TABLE 1.1
List of exemplary target gene sequences.

| Gene | Gene | SEQ | | | | |
|---|---|---|---|---|---|---|
| Symbol | ID No. | ID No. | Disease | OMIM | Genetics | Introns |
| OPA1 | 4976 | 1 | Optic atrophy | 165500 | Haploinsufficient | ENST00000361908.7: 6 |
| Organism: | | | type 1; Autosomal | | | ENST00000361908.7: 28 |
| homo | | | dominant optic | | | |
| sapiens | | | atrophy (ADOA) | | | |

TABLE 1.2
List of exemplary target gene sequences.

| Gene | Gene | SEQ | | | | |
|---|---|---|---|---|---|---|
| Symbol | ID No. | ID No. | Disease | OMIM | Genetics | Introns |
| OPA1 | 4976 | 1 | Optic atrophy | 165500 | Haploinsufficient | GRCh38/ |
| Organism: | | | type 1; Autosomal | | | hg38: chr3 |
| homo | | | dominant optic | | | 193626203 |
| sapiens | | | atrophy (ADOA) | | | 193631611 |
| | | | | | | GRCh38/ |
| | | | | | | hg38: chr3 |
| | | | | | | 193593374 |
| | | | | | | 193614710 |

TABLE 1.3
List of Sequences of Exemplary OPA1 Mature mRNA Variants
ENST00000361715.6, SEQ ID NO: 1254, organism: homo sapiens
GTGCTGCCCGCCTAGAAAGGGTGAAGTGGTTGTTTCCGTGACGGACTGAGTACGGGTGCCTGTCAGGCT
CTTGCGGAAGTCCATGCGCCATTGGGAGGGCCTCGGCCGCGGCTCTGTGCCCTTGCTGCTGAGGGCCAC
TTCCTGGGTCATTCCTGGACCGGGAGCCGGGCTGGGGCTCACACGGGGGCTCCCGCGTGGCCGTCTCGG
CGCCTGCGTGACCTCCCCGCCGGCGGGATGTGGCGACTACGTCGGGCCGCTGTGGCCTGTGAGGTCTGC
CAGTCTTTAGTGAAACACAGCTCTGGAATAAAAGGAAGTTTACCACTACAAAAACTACATCTGGTTTCA
CGAAGCATTTATCATTCACATCATCCTACCTTAAAGCTTCAACGACCCCAATTAAGGACATCCTTTCAG
CAGTTCTCTTCTCTGACAAACCTTCCTTTACGTAAACTGAAATTCTCTCCAATTAAATATGGCTACCAG
CCTCGCAGGAATTTTTGGCCAGCAAGATTAGCTACGAGACTCTTAAAACTTCGCTATCTCATACTAGGA
TCGGCTGTTGGGGGTGGCTACACAGCCAAAAAGACTTTTGATCAGTGGAAAGATATGATACCGGACCTT
AGTGAATATAAATGGATTGTGCCTGACATTGTGTGGGAAATTGATGAGTATATCGATTTTGGTCACAAA
TTGGTTAGTGAAGTCATAGGAGCTTCTGACCTACTTCTCTTGTTAGGTTCTCCGGAAGAAACGGCGTTT
AGAGCAACAGATCGTGGATCTGAAAGTGACAAGCATTTTAGAAAGGGTCTGCTTGGTGAGCTCATTCTC
TTACAACAACAAATTCAAGAGCATGAAGAGGAAGCGCGCAGAGCCGCTGGCCAATATAGCACGAGCTAT
GCCCAACAGAAGCGCAAGGTGTCAGACAAAGAGAAAATTGACCAACTTCAGGAAGAACTTCTGCACACT
CAGTTGAAGTATCAGAGAATCTTGGAACGATTAGAAAAGGAGAACAAAGAATTGAGAAAATTAGTATTG
CAGAAAGATGACAAAGGCATTCATCATAGAAAGCTTAAGAAATCTTTGATTGACATGTATTCTGAAGTT
CTTGATGTTCTCTCTGATTATGATGCCAGTTATAATACGCAAGATCATCTGCCACGGGTTGTTGTGGTT
GGAGATCAGAGTGCTGGAAAGACTAGTGTGTTGGAAATGATTGCCCAAGCTCGAATATTCCCAAGAGGA
TCTGGGGAGATGATGACACGTTCTCCAGTTAAGGTGACTCTGAGTGAAGGTCCTCACCATGTGGCCCTA
TTTAAAGATAGTTCTCGGGAGTTTGATCTTACCAAAGAAGAAGATCTTGCAGCATTAAGACATGAAATA
GAACTTCGAATGAGGAAAAATGTGAAAGAAGGCTGTACCGTTAGCCCTGAGACCATATCCTTAAATGTA
AAAGGCCCTGGACTACAGAGGATGGTGCTTGTTGACTTACCAGGTGTGATTAATACTGTGACATCAGGC
ATGGCTCCTGACACAAAGGAAACTATTTTCAGTATCAGCAAAGCTTACATGCAGAATCCTAATGCCATC
ATACTGTGTATTCAAGATGGATCTGTGGATGCTGAACGCAGTATTGTTACAGACTTGGTCAGTCAAATG
GACCCTCATGGAAGGAGAACCATATTCGTTTTGACCAAAGTAGACCTGGCAGAGAAAAATGTAGCCAGT
CCAAGCAGGATTCAGCAGATAATTGAAGGAAAGCTCTTCCCAATGAAAGCTTTAGGTTATTTTGCTGTT
GTAACAGGAAAAGGGAACAGCTCTGAAAGCATTGAAGCTATAAGAGAATATGAAGAAGAGTTTTTTCAG
AATTCAAAGCTCCTAAAGACAAGCATGCTAAAGGCACACCAAGTGACTACAAGAAATTTAAGCCTTGCA
GTATCAGACTGCTTTTGGAAAATGGTACGAGAGTCTGTTGAACAACAGGCTGATAGTTTCAAAGCAACA
CGTTTTAACCTTGAAACTGAATGGAAGAATAACTATCCTCGCCTGCGGGAACTTGACCGGAATGAACTA
TTTGAAAAAGCTAAAAATGAAATCCTTGATGAAGTTATCAGTCTGAGCCAGGTTACACCAAAACATTGG
GAGGAAATCCTTCAACAATCTTTGTGGGAAAGAGTATCAACTCATGTGATTGAAAACATCTACCTTCCA
GCTGCGCAGACCATGAATTCAGGAACTTTTAACACCACAGTGGATATCAAGCTTAAACAGTGGACTGAT
AAACAACTTCCTAATAAAGCAGTAGAGGTTGCTTGGGAGACCCTACAAGAAGAATTTTCCCGCTTTATG
ACAGAACCGAAAGGGAAAGAGCATGATGACATATTTGATAAACTTAAAGAGGCTGTTAAGGAAGAAAGT
ATTAAACGACACAAGTGGAATGACTTTGCGGAGGACAGCTTGAGGGTTATTCAACACAATGCTTTGGAA
GACCGATCCATATCTGATAAACAGCAATGGGATGCAGCTATTTATTTTATGGAAGAGGCTCTGCAGGCT
CGTCTCAAGGATACTGAAAATGCAATTGAAAACATGGTGGGTCCAGACTGGAAAAAGAGGTGGTTATAC
TGGAAGAATCGGACCCAAGAACAGTGTGTTCACAATGAAACCAAGAATGAATTGGAGAAGATGTTGAAA
TGTAATGAGGAGCACCCAGCTTATCTTGCAAGTGATGAAATAACCACAGTCCGGAAGAACCTTGAATCC
CGAGGAGTAGAAGTAGATCCAAGCTTGATTAAGGATACTTGGCATCAAGTTTATAGAAGACATTTTTTA
AAAACAGCTCTAAACCATTGTAACCTTTGTCGAAGAGGTTTTTATTACTACCAAAGGCATTTTGTAGAT
TCTGAGTTGGAATGCAATGATGTGGTCTTGTTTTGGCGTATACAGCGCATGCTTGCTATCACCGCAAAT
ACTTTAAGGCAACAACTTACAAATACTGAAGTTAGGCGATTAGAGAAAAATGTTAAAGAGGTATTGGAA
GATTTTGCTGAAGATGGTGAGAAGAAGATTAAATTGCTTACTGGTAAACGCGTTCAACTGGCGGAAGAC
CTCAAGAAAGTTAGAGAAATTCAAGAAAAACTTGATGCTTTCATTGAAGCTCTTCATCAGGAGAAATAA
ATTAAAATCGTACTCATAATCAGCTCTGCATACATCTGAAGAACAAAAACATCAACGTCTTTTGTCCAG
CCTCTTTTTCTTCTGCTGTTCCACCTTTCTAAACATACAATAAAGTCATGGGATAAAAATAATCGATGT
ATGTTACGGGCGCTTTAACCATCAGCTGCCTCTCGAATGGAAGAACAGTGGTAATGGATTAACATCCTA
TTTTGTTGTACTAAAGTGACAAATCGGAATAATATAATTGGTATGGCCATTAGGTTCAGTCCTTGAAGA
TAAGAAACTTGTTCTCTGTTTGTTGTCTTATTTGTGGTGGCACTCGTTTAATGGATTAACTGAGGTTGC
TCAATGTTCAGTTTCTTTTCCAGAAATACAATGCTAGGTGTTTTGAAATAAAACTTATATAGCAATTGT
TTAAAGTTATCAATTGTATATAAAATCACAGTAGCCTGCTAAATCATTGTATGTGTCTGTAGTATTCTA
TTCCCAGAAACTATTTGACCATGATAATTCAGTTTATATTCACCACATGAAAGAAAAATGGGTAACAGA
AGAACCCTTAAAACAGGTTAATTTGGATTGTAACGTTCAGTGAAAGAAATTTCAACCCTTCATAGCCAG
CGAAGAAATTTGCCTTGGAAGCCAAGTCAGTACCAGCTTACCTATTTGATTCAGTTGCTGTTTTCTCAC
TCTCTATATCCATTTGAAATTGATTTATTTTAGATGTTGTATACTTACGTTAGGCTTTCTGTTAATAGT
GGTTTTTCTCCTGTTGACAGAGCCACCGGATTATGACACAGGATGAGGAAGATTAAGGATAATCAATTG
ACTAATTTCATTTAGAATATTATCAAACATTTCAACTAGGTATCAGAAAAAGGCTTTCTTTCATAAGAC
TATTTTAAATAGAAATTATTTCAACAATTAAAGTAATGTTGACCATCCCCCTCTCAGCTGAATAAAGAA
AAATTTAGTTCAATTTATTGCAATTTAATTACAATACTACCTTCACAACATTTTCATGTGTTTTAAATA
AATATTTTTTAATTGGCTAAAGGACATTCAAGCAAAGAAATGCTTTCTTTACTTAAAATGTCTATCTCA
TTTGCTGCCTTTTCACTAAGCCTTTACTTTGTTAATAAAAGTGTCCATTGTGTGATGTTTTTGATTTTA
CAGTTTGCTAAATCTTATTTTCTTGGAGTTGCTTTTTGGTAACAGCCCCATTGCTACTCCCCATTTTAT
TGTTTTACATCAATGCATGCTTCGTTGTGATCCCTCAAGATGTAACACTTGGTATGCTCGGTTGAGGAT
ATGAAAAAATACTTCCGAAACCAGGAATTCAATGTATGTTTGTTTTATACTGTTTGATAAGAAAAGTAG
GTCCAGCCTTAAGCAGCACAGATGCGCTGGTAGATGCATAGTCAGGAACTTTTTTTATTTCTTTTAGGT
CTAGGGACAGGAGTGAATAGAAAGGGAGGAGAGCTCTATTATGTTCTATACACAGATTAGGAGATGACC
TTACTGGGTACACCCCTCTAACCAGTGCTTACAGGTTAATGCATGTTAATGAATATTTTTGCAGTTGTA
AAGCATAACAATTACAACTACACATCTATTTCTAAAGAATAAAACAGGACCATATTTATTTACTTCTGT
CAACTATAGAAAGAAAGACCTTCAGCTGTATTTCCACAGATTTCTCCCAAGGAAAAGGCTAATATTAGT
CACTACTGTTATCACATCCCTTTGTATAAGTTTTAAAAAGAGATGGAGGGAGATCTTCATTTCTTTGAG
GAGATCAGTATTGTAACGTATGTGAATAGATGATAACAATTAATATTACTAAAAGTCCCACATGAGAGT
CCTGACGCCCTCTCCATGCCCCACAGTAATGTGGCTTCTTTCATGGGTTTTTTTTTCTTCTTTTTAGCT
GATCTCATCCTAAGCATGCTTTATTTTTCCTTGAAAGCTAGGTATTTATCAACTGCAGATGTTATTGAA
AGAAAATAAAATTCAGTCTCAAGAGTAAACCCTGTGTCTTGTGTCTGTAGTTCAAAAGTCAGAAATGAT
TCTAATTTAAACAAAAAGATACTAAATATACAGAAGTTAAATTCGAACTAGCCACAGAATCATTTGTTT
TTATGTCAGAATTTGCAAAGAGTGGAGTGGACAAAGCTCTGTATGGAAGACTGAACAACTGTAAATAGA
TGATATCCAAACTTAATTTGGCTAGGACTTCAATTTTAAAAATCAGTGTACCTAGGCAGTGCACAGCAC
GAAATAAGTGGCCCTTGCAGCTTCCCCGTTTAACCCACTGTGCTATAGTTGCGGGTGGAACAGTCAACC
TTTCTAGTAGTTTATGATATTGCCCTCTTTGTATTCCCATTTTCTACAGTTTTTTCCGCAGACTTCTTT
CTGCAAATTATTCAGCCTCCAAATGCAAATGAATGATATAAAAATAAGTAGGGAACATGGCAGAGAGTG
GTGCTTCCCAGCCTCACAATGTGGGAATTTGACATAGGATGAGAGTCAGAGTATAGGTTTAAAAGATAA
AATCTTTAGTTAATAATTTTGTATTTATTTATTCTAGATGTATGTATCTGAGGAAAGAAATCTGGTATT
TTTGCTTTCCAATAAAGGGGATCAAAGTAATGGTTTTTCTCTCAGTTCTCTAAGCTGGTCTATGTTATA
GCTCTAGCAGTATGGAAATGTGCTTTAAAATATGCTTACCTTTTGAATGATCATGGCTATATGTTGTTG
AGATATTTGAAACTTACCTTGTTTTCACTTGTGCACTGTGAATGAACTTTGTATTATTTTTTTAAAACC
TTCACATTACGTGTAGATATTATTGCAACTTATATTTTGCCTGAGCTTGATCAAAGGTCATTTGTGTAG
ATGAGTAATTAAAAAATATTTAAATCACATTATAATTCTATTATTGGAGAGCATCTTTTAAATTTTTTT
CTGTTTTAACGAGGGAAAGAGAAACCTGTATACCTAGGGTCATTATTTGACCCCATAGTATAACCAGAT
TCATGGTCTAACAAGCTCTCAGTGTGGCTTTTCTCTGAATGCTTGAATTTCACATGCCTTGCATTTCAC
AGTTGTACTCCATGGTCAACCGGTGCTTTTTTTCACATCGTGGTACTTGTCAAAACATTTTGTTATTTT
CCTTGGTAAAATATATAAAAAAGGTTTTCTAATTTC
ENST00000361150.6, SEQ ID NO: 1255, organism: homo sapiens
GTGCTGCCCGCCTAGAAAGGGTGAAGTGGTTGTTTCCGTGACGGACTGAGTACGGGTGCCTGTCAGGCT
CTTGCGGAAGTCCATGCGCCATTGGGAGGGCCTCGGCCGCGGCTCTGTGCCCTTGCTGCTGAGGGCCAC
TTCCTGGGTCATTCCTGGACCGGGAGCCGGGCTGGGGCTCACACGGGGGCTCCCGCGTGGCCGTCTCGG
CGCCTGCGTGACCTCCCCGCCGGCGGGATGTGGCGACTACGTCGGGCCGCTGTGGCCTGTGAGGTCTGC
CAGTCTTTAGTGAAACACAGCTCTGGAATAAAAGGAAGTTTACCACTACAAAAACTACATCTGGTTTCA
CGAAGCATTTATCATTCACATCATCCTACCTTAAAGCTTCAACGACCCCAATTAAGGACATCCTTTCAG
CAGTTCTCTTCTCTGACAAACCTTCCTTTACGTAAACTGAAATTCTCTCCAATTAAATATGGCTACCAG
CCTCGCAGGAATTTTTGGCCAGCAAGATTAGCTACGAGACTCTTAAAACTTCGCTATCTCATACTAGGA
TCGGCTGTTGGGGGTGGCTACACAGCCAAAAAGACTTTTGATCAGTGGAAAGATATGATACCGGACCTT
AGTGAATATAAATGGATTGTGCCTGACATTGTGTGGGAAATTGATGAGTATATCGATTTTGGTTCTCCG
GAAGAAACGGCGTTTAGAGCAACAGATCGTGGATCTGAAAGTGACAAGCATTTTAGAAAGGGTCTGCTT
GGTGAGCTCATTCTCTTACAACAACAAATTCAAGAGCATGAAGAGGAAGCGCGCAGAGCCGCTGGCCAA
TATAGCACGAGCTATGCCCAACAGAAGCGCAAGGTGTCAGACAAAGAGAAAATTGACCAACTTCAGGAA
GAACTTCTGCACACTCAGTTGAAGTATCAGAGAATCTTGGAACGATTAGAAAAGGAGAACAAAGAATTG
AGAAAATTAGTATTGCAGAAAGATGACAAAGGCATTCATCATAGAAAGCTTAAGAAATCTTTGATTGAC
ATGTATTCTGAAGTTCTTGATGTTCTCTCTGATTATGATGCCAGTTATAATACGCAAGATCATCTGCCA
CGGGTTGTTGTGGTTGGAGATCAGAGTGCTGGAAAGACTAGTGTGTTGGAAATGATTGCCCAAGCTCGA
ATATTCCCAAGAGGATCTGGGGAGATGATGACACGTTCTCCAGTTAAGGTGACTCTGAGTGAAGGTCCT
CACCATGTGGCCCTATTTAAAGATAGTTCTCGGGAGTTTGATCTTACCAAAGAAGAAGATCTTGCAGCA
TTAAGACATGAAATAGAACTTCGAATGAGGAAAAATGTGAAAGAAGGCTGTACCGTTAGCCCTGAGACC
ATATCCTTAAATGTAAAAGGCCCTGGACTACAGAGGATGGTGCTTGTTGACTTACCAGGTGTGATTAAT
ACTGTGACATCAGGCATGGCTCCTGACACAAAGGAAACTATTTTCAGTATCAGCAAAGCTTACATGCAG
AATCCTAATGCCATCATACTGTGTATTCAAGATGGATCTGTGGATGCTGAACGCAGTATTGTTACAGAC
TTGGTCAGTCAAATGGACCCTCATGGAAGGAGAACCATATTCGTTTTGACCAAAGTAGACCTGGCAGAG
AAAAATGTAGCCAGTCCAAGCAGGATTCAGCAGATAATTGAAGGAAAGCTCTTCCCAATGAAAGCTTTA
GGTTATTTTGCTGTTGTAACAGGAAAAGGGAACAGCTCTGAAAGCATTGAAGCTATAAGAGAATATGAA
GAAGAGTTTTTTCAGAATTCAAAGCTCCTAAAGACAAGCATGCTAAAGGCACACCAAGTGACTACAAGA
AATTTAAGCCTTGCAGTATCAGACTGCTTTTGGAAAATGGTACGAGAGTCTGTTGAACAACAGGCTGAT
AGTTTCAAAGCAACACGTTTTAACCTTGAAACTGAATGGAAGAATAACTATCCTCGCCTGCGGGAACTT
GACCGGAATGAACTATTTGAAAAAGCTAAAAATGAAATCCTTGATGAAGTTATCAGTCTGAGCCAGGTT
ACACCAAAACATTGGGAGGAAATCCTTCAACAATCTTTGTGGGAAAGAGTATCAACTCATGTGATTGAA
AACATCTACCTTCCAGCTGCGCAGACCATGAATTCAGGAACTTTTAACACCACAGTGGATATCAAGCTT
AAACAGTGGACTGATAAACAACTTCCTAATAAAGCAGTAGAGGTTGCTTGGGAGACCCTACAAGAAGAA
TTTTCCCGCTTTATGACAGAACCGAAAGGGAAAGAGCATGATGACATATTTGATAAACTTAAAGAGGCT
GTTAAGGAAGAAAGTATTAAACGACACAAGTGGAATGACTTTGCGGAGGACAGCTTGAGGGTTATTCAA
CACAATGCTTTGGAAGACCGATCCATATCTGATAAACAGCAATGGGATGCAGCTATTTATTTTATGGAA
GAGGCTCTGCAGGCTCGTCTCAAGGATACTGAAAATGCAATTGAAAACATGGTGGGTCCAGACTGGAAA
AAGAGGTGGTTATACTGGAAGAATCGGACCCAAGAACAGTGTGTTCACAATGAAACCAAGAATGAATTG
GAGAAGATGTTGAAATGTAATGAGGAGCACCCAGCTTATCTTGCAAGTGATGAAATAACCACAGTCCGG
AAGAACCTTGAATCCCGAGGAGTAGAAGTAGATCCAAGCTTGATTAAGGATACTTGGCATCAAGTTTAT
AGAAGACATTTTTTAAAAACAGCTCTAAACCATTGTAACCTTTGTCGAAGAGGTTTTTATTACTACCAA
AGGCATTTTGTAGATTCTGAGTTGGAATGCAATGATGTGGTCTTGTTTTGGCGTATACAGCGCATGCTT
GCTATCACCGCAAATACTTTAAGGCAACAACTTACAAATACTGAAGTTAGGCGATTAGAGAAAAATGTT
AAAGAGGTATTGGAAGATTTTGCTGAAGATGGTGAGAAGAAGATTAAATTGCTTACTGGTAAACGCGTT
CAACTGGCGGAAGACCTCAAGAAAGTTAGAGAAATTCAAGAAAAACTTGATGCTTTCATTGAAGCTCTT
CATCAGGAGAAATAAATTAAAATCGTACTCATAATCAGCTCTGCATACATCTGAAGAACAAAAACATCA
ACGTCTTTTGTCCAGCCTCTTTTTCTTCTGCTGTTCCACCTTTCTAAACATACAATAAAGTCATGGGAT
AAAAATAATCGATGTATGTTACGGGCGCTTTAACCATCAGCTGCCTCTCGAATGGAAGAACAGTGGTAA
TGGATTAACATCCTATTTTGTTGTACTAAAGTGACAAATCGGAATAATATAATTGGTATGGCCATTAGG
TTCAGTCCTTGAAGATAAGAAACTTGTTCTCTGTTTGTTGTCTTATTTGTGGTGGCACTCGTTTAATGG
ATTAACTGAGGTTGCTCAATGTTCAGTTTCTTTTCCAGAAATACAATGCTAGGTGTTTTGAAATAAAAC
TTATATAGCAATTGTTTAAAGTTATCAATTGTATATAAAATCACAGTAGCCTGCTAAATCATTGTATGT
GTCTGTAGTATTCTATTCCCAGAAACTATTTGACCATGATAATTCAGTTTATATTCACCACATGAAAGA
AAAATGGGTAACAGAAGAACCCTTAAAACAGGTTAATTTGGATTGTAACGTTCAGTGAAAGAAATTTCA
ACCCTTCATAGCCAGCGAAGAAATTTGCCTTGGAAGCCAAGTCAGTACCAGCTTACCTATTTGATTCAG
TTGCTGTTTTCTCACTCTCTATATCCATTTGAAATTGATTTATTTTAGATGTTGTATACTTACGTTAGG
CTTTCTGTTAATAGTGGTTTTTCTCCTGTTGACAGAGCCACCGGATTATGACACAGGATGAGGAAGATT
AAGGATAATCAATTGACTAATTTCATTTAGAATATTATCAAACATTTCAACTAGGTATCAGAAAAAGGC
TTTCTTTCATAAGACTATTTTAAATAGAAATTATTTCAACAATTAAAGTAATGTTGACCATCCCCCTCT
CAGCTGAATAAAGAAAAATTTAGTTCAATTTATTGCAATTTAATTACAATACTACCTTCACAACATTTT
CATGTGTTTTAAATAAATATTTTTTAATTGGCTAAAGGACATTCAAGCAAAGAAATGCTTTCTTTACTT
AAAATGTCTATCTCATTTGCTGCCTTTTCACTAAGCCTTTACTTTGTTAATAAAAGTGTCCATTGTGTG
ATGTTTTTGATTTTACAGTTTGCTAAATCTTATTTTCTTGGAGTTGCTTTTTGGTAACAGCCCCATTGC
TACTCCCCATTTTATTGTTTTACATCAATGCATGCTTCGTTGTGATCCCTCAAGATGTAACACTTGGTA
TGCTCGGTTGAGGATATGAAAAAATACTTCCGAAACCAGGAATTCAATGTATGTTTGTTTTATACTGTT
TGATAAGAAAAGTAGGTCCAGCCTTAAGCAGCACAGATGCGCTGGTAGATGCATAGTCAGGAACTTTTT
TTATTTCTTTTAGGTCTAGGGACAGGAGTGAATAGAAAGGGAGGAGAGCTCTATTATGTTCTATACACA
GATTAGGAGATGACCTTACTGGGTACACCCCTCTAACCAGTGCTTACAGGTTAATGCATGTTAATGAAT
ATTTTTGCAGTTGTAAAGCATAACAATTACAACTACACATCTATTTCTAAAGAATAAAACAGGACCATA
TTTATTTACTTCTGTCAACTATAGAAAGAAAGACCTTCAGCTGTATTTCCACAGATTTCTCCCAAGGAA
AAGGCTAATATTAGTCACTACTGTTATCACATCCCTTTGTATAAGTTTTAAAAAGAGATGGAGGGAGAT
CTTCATTTCTTTGAGGAGATCAGTATTGTAACGTATGTGAATAGATGATAACAATTAATATTACTAAAA
GTCCCACATGAGAGTCCTGACGCCCTCTCCATGCCCCACAGTAATGTGGCTTCTTTCATGGGTTTTTTT
TTCTTCTTTTTAGCTGATCTCATCCTAAGCATGCTTTATTTTTCCTTGAAAGCTAGGTATTTATCAACT
GCAGATGTTATTGAAAGAAAATAAAATTCAGTCTCAAGAGTAAACCCTGTGTCTTGTGTCTGTAGTTCA
AAAGTCAGAAATGATTCTAATTTAAACAAAAAGATACTAAATATACAGAAGTTAAATTCGAACTAGCCA
CAGAATCATTTGTTTTTATGTCAGAATTTGCAAAGAGTGGAGTGGACAAAGCTCTGTATGGAAGACTGA
ACAACTGTAAATAGATGATATCCAAACTTAATTTGGCTAGGACTTCAATTTTAAAAATCAGTGTACCTA
GGCAGTGCACAGCACGAAATAAGTGGCCCTTGCAGCTTCCCCGTTTAACCCACTGTGCTATAGTTGCGG
GTGGAACAGTCAACCTTTCTAGTAGTTTATGATATTGCCCTCTTTGTATTCCCATTTTCTACAGTTTTT
TCCGCAGACTTCTTTCTGCAAATTATTCAGCCTCCAAATGCAAATGAATGATATAAAAATAAGTAGGGA
ACATGGCAGAGAGTGGTGCTTCCCAGCCTCACAATGTGGGAATTTGACATAGGATGAGAGTCAGAGTAT
AGGTTTAAAAGATAAAATCTTTAGTTAATAATTTTGTATTTATTTATTCTAGATGTATGTATCTGAGGA
AAGAAATCTGGTATTTTTGCTTTCCAATAAAGGGGATCAAAGTAATGGTTTTTCTCTCAGTTCTCTAAG
CTGGTCTATGTTATAGCTCTAGCAGTATGGAAATGTGCTTTAAAATATGCTTACCTTTTGAATGATCAT
GGCTATATGTTGTTGAGATATTTGAAACTTACCTTGTTTTCACTTGTGCACTGTGAATGAACTTTGTAT
TATTTTTTTAAAACCTTCACATTACGTGTAGATATTATTGCAACTTATATTTTGCCTGAGCTTGATCAA
AGGTCATTTGTGTAGATGAGTAATTAAAAAATATTTAAATCACATTATAATTCTATTATTGGAGAGCAT
CTTTTAAATTTTTTTCTGTTTTAACGAGGGAAAGAGAAACCTGTATACCTAGGGTCATTATTTGACCCC
ATAGTATAACCAGATTCATGGTCTAACAAGCTCTCAGTGTGGCTTTTCTCTGAATGCTTGAATTTCACA
TGCCTTGCATTTCACAGTTGTACTCCATGGTCAACCGGTGCTTTTTTTCACATCGTGGTACTTGTCAAA
ACATTTTGTTATTTTCCTTGGTAAAATATATAAAAAAGGTTTTCTAATTTC
ENST00000361828.7, SEQ ID NO: 1256, organism: homo sapiens
GTGCTGCCCGCCTAGAAAGGGTGAAGTGGTTGTTTCCGTGACGGACTGAGTACGGGTGCCTGTCAGGCT
CTTGCGGAAGTCCATGCGCCATTGGGAGGGCCTCGGCCGCGGCTCTGTGCCCTTGCTGCTGAGGGCCAC
TTCCTGGGTCATTCCTGGACCGGGAGCCGGGCTGGGGCTCACACGGGGGCTCCCGCGTGGCCGTCTCGG
CGCCTGCGTGACCTCCCCGCCGGCGGGATGTGGCGACTACGTCGGGCCGCTGTGGCCTGTGAGGTCTGC
CAGTCTTTAGTGAAACACAGCTCTGGAATAAAAGGAAGTTTACCACTACAAAAACTACATCTGGTTTCA
CGAAGCATTTATCATTCACATCATCCTACCTTAAAGCTTCAACGACCCCAATTAAGGACATCCTTTCAG
CAGTTCTCTTCTCTGACAAACCTTCCTTTACGTAAACTGAAATTCTCTCCAATTAAATATGGCTACCAG
CCTCGCAGGAATTTTTGGCCAGCAAGATTAGCTACGAGACTCTTAAAACTTCGCTATCTCATACTAGGA
TCGGCTGTTGGGGGTGGCTACACAGCCAAAAAGACTTTTGATCAGTGGAAAGATATGATACCGGACCTT
AGTGAATATAAATGGATTGTGCCTGACATTGTGTGGGAAATTGATGAGTATATCGATTTTGAGAAAATT
AGAAAAGCCCTTCCTAGTTCAGAAGACCTTGTAAAGTTAGCACCAGACTTTGACAAGATTGTTGAAAGC
CTTAGCTTATTGAAGGACTTTTTTACCTCAGGTTCTCCGGAAGAAACGGCGTTTAGAGCAACAGATCGT
GGATCTGAAAGTGACAAGCATTTTAGAAAGGTGTCAGACAAAGAGAAAATTGACCAACTTCAGGAAGAA
CTTCTGCACACTCAGTTGAAGTATCAGAGAATCTTGGAACGATTAGAAAAGGAGAACAAAGAATTGAGA
AAATTAGTATTGCAGAAAGATGACAAAGGCATTCATCATAGAAAGCTTAAGAAATCTTTGATTGACATG
TATTCTGAAGTTCTTGATGTTCTCTCTGATTATGATGCCAGTTATAATACGCAAGATCATCTGCCACGG
GTTGTTGTGGTTGGAGATCAGAGTGCTGGAAAGACTAGTGTGTTGGAAATGATTGCCCAAGCTCGAATA
TTCCCAAGAGGATCTGGGGAGATGATGACACGTTCTCCAGTTAAGGTGACTCTGAGTGAAGGTCCTCAC
CATGTGGCCCTATTTAAAGATAGTTCTCGGGAGTTTGATCTTACCAAAGAAGAAGATCTTGCAGCATTA
AGACATGAAATAGAACTTCGAATGAGGAAAAATGTGAAAGAAGGCTGTACCGTTAGCCCTGAGACCATA
TCCTTAAATGTAAAAGGCCCTGGACTACAGAGGATGGTGCTTGTTGACTTACCAGGTGTGATTAATACT
GTGACATCAGGCATGGCTCCTGACACAAAGGAAACTATTTTCAGTATCAGCAAAGCTTACATGCAGAAT
CCTAATGCCATCATACTGTGTATTCAAGATGGATCTGTGGATGCTGAACGCAGTATTGTTACAGACTTG
GTCAGTCAAATGGACCCTCATGGAAGGAGAACCATATTCGTTTTGACCAAAGTAGACCTGGCAGAGAAA
AATGTAGCCAGTCCAAGCAGGATTCAGCAGATAATTGAAGGAAAGCTCTTCCCAATGAAAGCTTTAGGT
TATTTTGCTGTTGTAACAGGAAAAGGGAACAGCTCTGAAAGCATTGAAGCTATAAGAGAATATGAAGAA
GAGTTTTTTCAGAATTCAAAGCTCCTAAAGACAAGCATGCTAAAGGCACACCAAGTGACTACAAGAAAT
TTAAGCCTTGCAGTATCAGACTGCTTTTGGAAAATGGTACGAGAGTCTGTTGAACAACAGGCTGATAGT
TTCAAAGCAACACGTTTTAACCTTGAAACTGAATGGAAGAATAACTATCCTCGCCTGCGGGAACTTGAC
CGGAATGAACTATTTGAAAAAGCTAAAAATGAAATCCTTGATGAAGTTATCAGTCTGAGCCAGGTTACA
CCAAAACATTGGGAGGAAATCCTTCAACAATCTTTGTGGGAAAGAGTATCAACTCATGTGATTGAAAAC
ATCTACCTTCCAGCTGCGCAGACCATGAATTCAGGAACTTTTAACACCACAGTGGATATCAAGCTTAAA
CAGTGGACTGATAAACAACTTCCTAATAAAGCAGTAGAGGTTGCTTGGGAGACCCTACAAGAAGAATTT
TCCCGCTTTATGACAGAACCGAAAGGGAAAGAGCATGATGACATATTTGATAAACTTAAAGAGGCTGTT
AAGGAAGAAAGTATTAAACGACACAAGTGGAATGACTTTGCGGAGGACAGCTTGAGGGTTATTCAACAC
AATGCTTTGGAAGACCGATCCATATCTGATAAACAGCAATGGGATGCAGCTATTTATTTTATGGAAGAG
GCTCTGCAGGCTCGTCTCAAGGATACTGAAAATGCAATTGAAAACATGGTGGGTCCAGACTGGAAAAAG
AGGTGGTTATACTGGAAGAATCGGACCCAAGAACAGTGTGTTCACAATGAAACCAAGAATGAATTGGAG
AAGATGTTGAAATGTAATGAGGAGCACCCAGCTTATCTTGCAAGTGATGAAATAACCACAGTCCGGAAG
AACCTTGAATCCCGAGGAGTAGAAGTAGATCCAAGCTTGATTAAGGATACTTGGCATCAAGTTTATAGA
AGACATTTTTTAAAAACAGCTCTAAACCATTGTAACCTTTGTCGAAGAGGTTTTTATTACTACCAAAGG
CATTTTGTAGATTCTGAGTTGGAATGCAATGATGTGGTCTTGTTTTGGCGTATACAGCGCATGCTTGCT
ATCACCGCAAATACTTTAAGGCAACAACTTACAAATACTGAAGTTAGGCGATTAGAGAAAAATGTTAAA
GAGGTATTGGAAGATTTTGCTGAAGATGGTGAGAAGAAGATTAAATTGCTTACTGGTAAACGCGTTCAA
CTGGCGGAAGACCTCAAGAAAGTTAGAGAAATTCAAGAAAAACTTGATGCTTTCATTGAAGCTCTTCAT
CAGGAGAAATAAATTAAAATCGTACTCATAATCAGCTCTGCATACATCTGAAGAACAAAAACATCAACG
TCTTTTGTCCAGCCTCTTTTTCTTCTGCTGTTCCACCTTTCTAAACATACAATAAAGTCATGGGATAAA
AATAATCGATGTATGTTACGGGCGCTTTAACCATCAGCTGCCTCTCGAATGGAAGAACAGTGGTAATGG
ATTAACATCCTATTTTGTTGTACTAAAGTGACAAATCGGAATAATATAATTGGTATGGCCATTAGGTTC
AGTCCTTGAAGATAAGAAACTTGTTCTCTGTTTGTTGTCTTATTTGTGGTGGCACTCGTTTAATGGATT
AACTGAGGTTGCTCAATGTTCAGTTTCTTTTCCAGAAATACAATGCTAGGTGTTTTGAAATAAAACTTA
TATAGCAATTGTTTAAAGTTATCAATTGTATATAAAATCACAGTAGCCTGCTAAATCATTGTATGTGTC
TGTAGTATTCTATTCCCAGAAACTATTTGACCATGATAATTCAGTTTATATTCACCACATGAAAGAAAA
ATGGGTAACAGAAGAACCCTTAAAACAGGTTAATTTGGATTGTAACGTTCAGTGAAAGAAATTTCAACC
CTTCATAGCCAGCGAAGAAATTTGCCTTGGAAGCCAAGTCAGTACCAGCTTACCTATTTGATTCAGTTG
CTGTTTTCTCACTCTCTATATCCATTTGAAATTGATTTATTTTAGATGTTGTATACTTACGTTAGGCTT
TCTGTTAATAGTGGTTTTTCTCCTGTTGACAGAGCCACCGGATTATGACACAGGATGAGGAAGATTAAG
GATAATCAATTGACTAATTTCATTTAGAATATTATCAAACATTTCAACTAGGTATCAGAAAAAGGCTTT
CTTTCATAAGACTATTTTAAATAGAAATTATTTCAACAATTAAAGTAATGTTGACCATCCCCCTCTCAG
CTGAATAAAGAAAAATTTAGTTCAATTTATTGCAATTTAATTACAATACTACCTTCACAACATTTTCAT
GTGTTTTAAATAAATATTTTTTAATTGGCTAAAGGACATTCAAGCAAAGAAATGCTTTCTTTACTTAAA
ATGTCTATCTCATTTGCTGCCTTTTCACTAAGCCTTTACTTTGTTAATAAAAGTGTCCATTGTGTGATG
TTTTTGATTTTACAGTTTGCTAAATCTTATTTTCTTGGAGTTGCTTTTTGGTAACAGCCCCATTGCTAC
TCCCCATTTTATTGTTTTACATCAATGCATGCTTCGTTGTGATCCCTCAAGATGTAACACTTGGTATGC
TCGGTTGAGGATATGAAAAAATACTTCCGAAACCAGGAATTCAATGTATGTTTGTTTTATACTGTTTGA
TAAGAAAAGTAGGTCCAGCCTTAAGCAGCACAGATGCGCTGGTAGATGCATAGTCAGGAACTTTTTTTA
TTTCTTTTAGGTCTAGGGACAGGAGTGAATAGAAAGGGAGGAGAGCTCTATTATGTTCTATACACAGAT
TAGGAGATGACCTTACTGGGTACACCCCTCTAACCAGTGCTTACAGGTTAATGCATGTTAATGAATATT
TTTGCAGTTGTAAAGCATAACAATTACAACTACACATCTATTTCTAAAGAATAAAACAGGACCATATTT
ATTTACTTCTGTCAACTATAGAAAGAAAGACCTTCAGCTGTATTTCCACAGATTTCTCCCAAGGAAAAG
GCTAATATTAGTCACTACTGTTATCACATCCCTTTGTATAAGTTTTAAAAAGAGATGGAGGGAGATCTT
CATTTCTTTGAGGAGATCAGTATTGTAACGTATGTGAATAGATGATAACAATTAATATTACTAAAAGTC
CCACATGAGAGTCCTGACGCCCTCTCCATGCCCCACAGTAATGTGGCTTCTTTCATGGGTTTTTTTTTC
TTCTTTTTAGCTGATCTCATCCTAAGCATGCTTTATTTTTCCTTGAAAGCTAGGTATTTATCAACTGCA
GATGTTATTGAAAGAAAATAAAATTCAGTCTCAAGAGTAAACCCTGTGTCTTGTGTCTGTAGTTCAAAA
GTCAGAAATGATTCTAATTTAAACAAAAAGATACTAAATATACAGAAGTTAAATTCGAACTAGCCACAG
AATCATTTGTTTTTATGTCAGAATTTGCAAAGAGTGGAGTGGACAAAGCTCTGTATGGAAGACTGAACA
ACTGTAAATAGATGATATCCAAACTTAATTTGGCTAGGACTTCAATTTTAAAAATCAGTGTACCTAGGC
AGTGCACAGCACGAAATAAGTGGCCCTTGCAGCTTCCCCGTTTAACCCACTGTGCTATAGTTGCGGGTG
GAACAGTCAACCTTTCTAGTAGTTTATGATATTGCCCTCTTTGTATTCCCATTTTCTACAGTTTTTTCC
GCAGACTTCTTTCTGCAAATTATTCAGCCTCCAAATGCAAATGAATGATATAAAAATAAGTAGGGAACA
TGGCAGAGAGTGGTGCTTCCCAGCCTCACAATGTGGGAATTTGACATAGGATGAGAGTCAGAGTATAGG
TTTAAAAGATAAAATCTTTAGTTAATAATTTTGTATTTATTTATTCTAGATGTATGTATCTGAGGAAAG
AAATCTGGTATTTTTGCTTTCCAATAAAGGGGATCAAAGTAATGGTTTTTCTCTCAGTTCTCTAAGCTG
GTCTATGTTATAGCTCTAGCAGTATGGAAATGTGCTTTAAAATATGCTTACCTTTTGAATGATCATGGC
TATATGTTGTTGAGATATTTGAAACTTACCTTGTTTTCACTTGTGCACTGTGAATGAACTTTGTATTAT
TTTTTTAAAACCTTCACATTACGTGTAGATATTATTGCAACTTATATTTTGCCTGAGCTTGATCAAAGG
TCATTTGTGTAGATGAGTAATTAAAAAATATTTAAATCACATTATAATTCTATTATTGGAGAGCATCTT
TTAAATTTTTTTCTGTTTTAACGAGGGAAAGAGAAACCTGTATACCTAGGGTCATTATTTGACCCCATA
GTATAACCAGATTCATGGTCTAACAAGCTCTCAGTGTGGCTTTTCTCTGAATGCTTGAATTTCACATGC
CTTGCATTTCACAGTTGTACTCCATGGTCAACCGGTGCTTTTTTTCACATCGTGGTACTTGTCAAAACA
TTTTGTTATTTTCCTTGGTAAAATATATAAAAAAGGTTTTCTAATTTCA
ENST00000361908.8, SEQ ID NO: 1257, organism: homo sapiens
GGACTGAGTACGGGTGCCTGTCAGGCTCTTGCGGAAGTCCATGCGCCATTGGGAGGGCCTCGGCCGCGG
CTCTGTGCCCTTGCTGCTGAGGGCCACTTCCTGGGTCATTCCTGGACCGGGAGCCGGGCTGGGGCTCAC
ACGGGGGCTCCCGCGTGGCCGTCTCGGCGCCTGCGTGACCTCCCCGCCGGCGGGATGTGGCGACTACGT
CGGGCCGCTGTGGCCTGTGAGGTCTGCCAGTCTTTAGTGAAACACAGCTCTGGAATAAAAGGAAGTTTA
CCACTACAAAAACTACATCTGGTTTCACGAAGCATTTATCATTCACATCATCCTACCTTAAAGCTTCAA
CGACCCCAATTAAGGACATCCTTTCAGCAGTTCTCTTCTCTGACAAACCTTCCTTTACGTAAACTGAAA
TTCTCTCCAATTAAATATGGCTACCAGCCTCGCAGGAATTTTTGGCCAGCAAGATTAGCTACGAGACTC
TTAAAACTTCGCTATCTCATACTAGGATCGGCTGTTGGGGGTGGCTACACAGCCAAAAAGACTTTTGAT
CAGTGGAAAGATATGATACCGGACCTTAGTGAATATAAATGGATTGTGCCTGACATTGTGTGGGAAATT
GATGAGTATATCGATTTTGAGAAAATTAGAAAAGCCCTTCCTAGTTCAGAAGACCTTGTAAAGTTAGCA
CCAGACTTTGACAAGATTGTTGAAAGCCTTAGCTTATTGAAGGACTTTTTTACCTCAGGTTCTCCGGAA
GAAACGGCGTTTAGAGCAACAGATCGTGGATCTGAAAGTGACAAGCATTTTAGAAAGGGTCTGCTTGGT
GAGCTCATTCTCTTACAACAACAAATTCAAGAGCATGAAGAGGAAGCGCGCAGAGCCGCTGGCCAATAT
AGCACGAGCTATGCCCAACAGAAGCGCAAGGTGTCAGACAAAGAGAAAATTGACCAACTTCAGGAAGAA
CTTCTGCACACTCAGTTGAAGTATCAGAGAATCTTGGAACGATTAGAAAAGGAGAACAAAGAATTGAGA
AAATTAGTATTGCAGAAAGATGACAAAGGCATTCATCATAGAAAGCTTAAGAAATCTTTGATTGACATG
TATTCTGAAGTTCTTGATGTTCTCTCTGATTATGATGCCAGTTATAATACGCAAGATCATCTGCCACGG
GTTGTTGTGGTTGGAGATCAGAGTGCTGGAAAGACTAGTGTGTTGGAAATGATTGCCCAAGCTCGAATA
TTCCCAAGAGGATCTGGGGAGATGATGACACGTTCTCCAGTTAAGGTGACTCTGAGTGAAGGTCCTCAC
CATGTGGCCCTATTTAAAGATAGTTCTCGGGAGTTTGATCTTACCAAAGAAGAAGATCTTGCAGCATTA
AGACATGAAATAGAACTTCGAATGAGGAAAAATGTGAAAGAAGGCTGTACCGTTAGCCCTGAGACCATA
TCCTTAAATGTAAAAGGCCCTGGACTACAGAGGATGGTGCTTGTTGACTTACCAGGTGTGATTAATACT
GTGACATCAGGCATGGCTCCTGACACAAAGGAAACTATTTTCAGTATCAGCAAAGCTTACATGCAGAAT
CCTAATGCCATCATACTGTGTATTCAAGATGGATCTGTGGATGCTGAACGCAGTATTGTTACAGACTTG
GTCAGTCAAATGGACCCTCATGGAAGGAGAACCATATTCGTTTTGACCAAAGTAGACCTGGCAGAGAAA
AATGTAGCCAGTCCAAGCAGGATTCAGCAGATAATTGAAGGAAAGCTCTTCCCAATGAAAGCTTTAGGT
TATTTTGCTGTTGTAACAGGAAAAGGGAACAGCTCTGAAAGCATTGAAGCTATAAGAGAATATGAAGAA
GAGTTTTTTCAGAATTCAAAGCTCCTAAAGACAAGCATGCTAAAGGCACACCAAGTGACTACAAGAAAT
TTAAGCCTTGCAGTATCAGACTGCTTTTGGAAAATGGTACGAGAGTCTGTTGAACAACAGGCTGATAGT
TTCAAAGCAACACGTTTTAACCTTGAAACTGAATGGAAGAATAACTATCCTCGCCTGCGGGAACTTGAC
CGGAATGAACTATTTGAAAAAGCTAAAAATGAAATCCTTGATGAAGTTATCAGTCTGAGCCAGGTTACA
CCAAAACATTGGGAGGAAATCCTTCAACAATCTTTGTGGGAAAGAGTATCAACTCATGTGATTGAAAAC
ATCTACCTTCCAGCTGCGCAGACCATGAATTCAGGAACTTTTAACACCACAGTGGATATCAAGCTTAAA
CAGTGGACTGATAAACAACTTCCTAATAAAGCAGTAGAGGTTGCTTGGGAGACCCTACAAGAAGAATTT
TCCCGCTTTATGACAGAACCGAAAGGGAAAGAGCATGATGACATATTTGATAAACTTAAAGAGGCTGTT
AAGGAAGAAAGTATTAAACGACACAAGTGGAATGACTTTGCGGAGGACAGCTTGAGGGTTATTCAACAC
AATGCTTTGGAAGACCGATCCATATCTGATAAACAGCAATGGGATGCAGCTATTTATTTTATGGAAGAG
GCTCTGCAGGCTCGTCTCAAGGATACTGAAAATGCAATTGAAAACATGGTGGGTCCAGACTGGAAAAAG
AGGTGGTTATACTGGAAGAATCGGACCCAAGAACAGTGTGTTCACAATGAAACCAAGAATGAATTGGAG
AAGATGTTGAAATGTAATGAGGAGCACCCAGCTTATCTTGCAAGTGATGAAATAACCACAGTCCGGAAG
AACCTTGAATCCCGAGGAGTAGAAGTAGATCCAAGCTTGATTAAGGATACTTGGCATCAAGTTTATAGA
AGACATTTTTTAAAAACAGCTCTAAACCATTGTAACCTTTGTCGAAGAGGTTTTTATTACTACCAAAGG
CATTTTGTAGATTCTGAGTTGGAATGCAATGATGTGGTCTTGTTTTGGCGTATACAGCGCATGCTTGCT
ATCACCGCAAATACTTTAAGGCAACAACTTACAAATACTGAAGTTAGGCGATTAGAGAAAAATGTTAAA
GAGGTATTGGAAGATTTTGCTGAAGATGGTGAGAAGAAGATTAAATTGCTTACTGGTAAACGCGTTCAA
CTGGCGGAAGACCTCAAGAAAGTTAGAGAAATTCAAGAAAAACTTGATGCTTTCATTGAAGCTCTTCAT
CAGGAGAAATAAATTAAAATCGTACTCATAATCAGCTCTGCATACATCTGAAGAACAAAAACATCAACG
TCTTTTGTCCAGCCTCTTTTTCTTCTGCTGTTCCACCTTTCTAAACATACAATAAAGTCATGGGATAAA
AATAATCGATGTATGTTACGGGCGCTTTAACCATCAGCTGCCTCTCGAATGGAAGAACAGTGGTAATGG
ATTAACATCCTATTTTGTTGTACTAAAGTGACAAATCGGAATAATATAATTGGTATGGCCATTAGGTTC
AGTCCTTGAAGATAAGAAACTTGTTCTCTGTTTGTTGTCTTATTTGTGGTGGCACTCGTTTAATGGATT
AACTGAGGTTGCTCAATGTTCAGTTTCTTTTCCAGAAATACAATGCTAGGTGTTTTGAAATAAAACTTA
TATAGCAATTGTTTAAAGTTATCAATTGTATATAAAATCACAGTAGCCTGCTAAATCATTGTATGTGTC
TGTAGTATTCTATTCCCAGAAACTATTTGACCATGATAATTCAGTTTATATTCACCACATGAAAGAAAA
ATGGGTAACAGAAGAACCCTTAAAACAGGTTAATTTGGATTGTAACGTTCAGTGAAAGAAATTTCAACC
CTTCATAGCCAGCGAAGAAATTTGCCTTGGAAGCCAAGTCAGTACCAGCTTACCTATTTGATTCAGTTG
CTGTTTTCTCACTCTCTATATCCATTTGAAATTGATTTATTTTAGATGTTGTATACTTACGTTAGGCTT
TCTGTTAATAGTGGTTTTTCTCCTGTTGACAGAGCCACCGGATTATGACACAGGATGAGGAAGATTAAG
GATAATCAATTGACTAATTTCATTTAGAATATTATCAAACATTTCAACTAGGTATCAGAAAAAGGCTTT
CTTTCATAAGACTATTTTAAATAGAAATTATTTCAACAATTAAAGTAATGTTGACCATCCCCCTCTCAG
CTGAATAAAGAAAAATTTAGTTCAATTTATTGCAATTTAATTACAATACTACCTTCACAACATTTTCAT
GTGTTTTAAATAAATATTTTTTAATTGGCTAAAGGACATTCAAGCAAAGAAATGCTTTCTTTACTTAAA
ATGTCTATCTCATTTGCTGCCTTTTCACTAAGCCTTTACTTTGTTAATAAAAGTGTCCATTGTGTGATG
TTTTTGATTTTACAGTTTGCTAAATCTTATTTTCTTGGAGTTGCTTTTTGGTAACAGCCCCATTGCTAC
TCCCCATTTTATTGTTTTACATCAATGCATGCTTCGTTGTGATCCCTCAAGATGTAACACTTGGTATGC
TCGGTTGAGGATATGAAAAAATACTTCCGAAACCAGGAATTCAATGTATGTTTGTTTTATACTGTTTGA
TAAGAAAAGTAGGTCCAGCCTTAAGCAGCACAGATGCGCTGGTAGATGCATAGTCAGGAACTTTTTTTA
TTTCTTTTAGGTCTAGGGACAGGAGTGAATAGAAAGGGAGGAGAGCTCTATTATGTTCTATACACAGAT
TAGGAGATGACCTTACTGGGTACACCCCTCTAACCAGTGCTTACAGGTTAATGCATGTTAATGAATATT
TTTGCAGTTGTAAAGCATAACAATTACAACTACACATCTATTTCTAAAGAATAAAACAGGACCATATTT
ATTTACTTCTGTCAACTATAGAAAGAAAGACCTTCAGCTGTATTTCCACAGATTTCTCCCAAGGAAAAG
GCTAATATTAGTCACTACTGTTATCACATCCCTTTGTATAAGTTTTAAAAAGAGATGGAGGGAGATCTT
CATTTCTTTGAGGAGATCAGTATTGTAACGTATGTGAATAGATGATAACAATTAATATTACTAAAAGTC
CCACATGAGAGTCCTGACGCCCTCTCCATGCCCCACAGTAATGTGGCTTCTTTCATGGGTTTTTTTTTC
TTCTTTTTAGCTGATCTCATCCTAAGCATGCTTTATTTTTCCTTGAAAGCTAGGTATTTATCAACTGCA
GATGTTATTGAAAGAAAATAAAATTCAGTCTCAAGAGTAAACCCTGTGTCTTGTGTCTGTAGTTCAAAA
GTCAGAAATGATTCTAATTTAAACAAAAAGATACTAAATATACAGAAGTTAAATTCGAACTAGCCACAG
AATCATTTGTTTTTATGTCAGAATTTGCAAAGAGTGGAGTGGACAAAGCTCTGTATGGAAGACTGAACA
ACTGTAAATAGATGATATCCAAACTTAATTTGGCTAGGACTTCAATTTTAAAAATCAGTGTACCTAGGC
AGTGCACAGCACGAAATAAGTGGCCCTTGCAGCTTCCCCGTTTAACCCACTGTGCTATAGTTGCGGGTG
GAACAGTCAACCTTTCTAGTAGTTTATGATATTGCCCTCTTTGTATTCCCATTTTCTACAGTTTTTTCC
GCAGACTTCTTTCTGCAAATTATTCAGCCTCCAAATGCAAATGAATGATATAAAAATAAGTAGGGAACA
TGGCAGAGAGTGGTGCTTCCCAGCCTCACAATGTGGGAATTTGACATAGGATGAGAGTCAGAGTATAGG
TTTAAAAGATAAAATCTTTAGTTAATAATTTTGTATTTATTTATTCTAGATGTATGTATCTGAGGAAAG
AAATCTGGTATTTTTGCTTTCCAATAAAGGGGATCAAAGTAATGGTTTTTCTCTCAGTTCTCTAAGCTG
GTCTATGTTATAGCTCTAGCAGTATGGAAATGTGCTTTAAAATATGCTTACCTTTTGAATGATCATGGC
TATATGTTGTTGAGATATTTGAAACTTACCTTGTTTTCACTTGTGCACTGTGAATGAACTTTGTATTAT
TTTTTTAAAACCTTCACATTACGTGTAGATATTATTGCAACTTATATTTTGCCTGAGCTTGATCAAAGG
TCATTTGTGTAGATGAGTAATTAAAAAATATTTAAATCACATTATAATTCTATTATTGGAGAGCATCTT
TTAAATTTTTTTCTGTTTTAACGAGGGAAAGAGAAACCTGTATACCTAGGGTCATTATTTGACCCCATA
GTATAACCAGATTCATGGTCTAACAAGCTCTCAGTGTGGCTTTTCTCTGAATGCTTGAATTTCACATGC
CTTGCATTTCACAGTTGTACTCCATGGTCAACCGGTGCTTTTTTTCACATCGTGGTACTTGTCAAAACA
TTTTGTTATTTTCCTTGGTAAAATATATAAAAAAGGTTTTCTAATTTCA
ENST00000361510.8, SEQ ID NO: 1258, organism: homo sapiens
AGGCTCTTGCGGAAGTCCATGCGCCATTGGGAGGGCCTCGGCCGCGGCTCTGTGCCCTTGCTGCTGAGG
GCCACTTCCTGGGTCATTCCTGGACCGGGAGCCGGGCTGGGGCTCACACGGGGGCTCCCGCGTGGCCGT
CTCGGCGCCTGCGTGACCTCCCCGCCGGCGGGATGTGGCGACTACGTCGGGCCGCTGTGGCCTGTGAGG
TCTGCCAGTCTTTAGTGAAACACAGCTCTGGAATAAAAGGAAGTTTACCACTACAAAAACTACATCTGG
TTTCACGAAGCATTTATCATTCACATCATCCTACCTTAAAGCTTCAACGACCCCAATTAAGGACATCCT
TTCAGCAGTTCTCTTCTCTGACAAACCTTCCTTTACGTAAACTGAAATTCTCTCCAATTAAATATGGCT
ACCAGCCTCGCAGGAATTTTTGGCCAGCAAGATTAGCTACGAGACTCTTAAAACTTCGCTATCTCATAC
TAGGATCGGCTGTTGGGGGTGGCTACACAGCCAAAAAGACTTTTGATCAGTGGAAAGATATGATACCGG
ACCTTAGTGAATATAAATGGATTGTGCCTGACATTGTGTGGGAAATTGATGAGTATATCGATTTTGAGA
AAATTAGAAAAGCCCTTCCTAGTTCAGAAGACCTTGTAAAGTTAGCACCAGACTTTGACAAGATTGTTG
AAAGCCTTAGCTTATTGAAGGACTTTTTTACCTCAGGTCACAAATTGGTTAGTGAAGTCATAGGAGCTT
CTGACCTACTTCTCTTGTTAGGTTCTCCGGAAGAAACGGCGTTTAGAGCAACAGATCGTGGATCTGAAA
GTGACAAGCATTTTAGAAAGGGTCTGCTTGGTGAGCTCATTCTCTTACAACAACAAATTCAAGAGCATG
AAGAGGAAGCGCGCAGAGCCGCTGGCCAATATAGCACGAGCTATGCCCAACAGAAGCGCAAGGTGTCAG
ACAAAGAGAAAATTGACCAACTTCAGGAAGAACTTCTGCACACTCAGTTGAAGTATCAGAGAATCTTGG
AACGATTAGAAAAGGAGAACAAAGAATTGAGAAAATTAGTATTGCAGAAAGATGACAAAGGCATTCATC
ATAGAAAGCTTAAGAAATCTTTGATTGACATGTATTCTGAAGTTCTTGATGTTCTCTCTGATTATGATG
CCAGTTATAATACGCAAGATCATCTGCCACGGGTTGTTGTGGTTGGAGATCAGAGTGCTGGAAAGACTA
GTGTGTTGGAAATGATTGCCCAAGCTCGAATATTCCCAAGAGGATCTGGGGAGATGATGACACGTTCTC
CAGTTAAGGTGACTCTGAGTGAAGGTCCTCACCATGTGGCCCTATTTAAAGATAGTTCTCGGGAGTTTG
ATCTTACCAAAGAAGAAGATCTTGCAGCATTAAGACATGAAATAGAACTTCGAATGAGGAAAAATGTGA
AAGAAGGCTGTACCGTTAGCCCTGAGACCATATCCTTAAATGTAAAAGGCCCTGGACTACAGAGGATGG
TGCTTGTTGACTTACCAGGTGTGATTAATACTGTGACATCAGGCATGGCTCCTGACACAAAGGAAACTA
TTTTCAGTATCAGCAAAGCTTACATGCAGAATCCTAATGCCATCATACTGTGTATTCAAGATGGATCTG
TGGATGCTGAACGCAGTATTGTTACAGACTTGGTCAGTCAAATGGACCCTCATGGAAGGAGAACCATAT
TCGTTTTGACCAAAGTAGACCTGGCAGAGAAAAATGTAGCCAGTCCAAGCAGGATTCAGCAGATAATTG
AAGGAAAGCTCTTCCCAATGAAAGCTTTAGGTTATTTTGCTGTTGTAACAGGAAAAGGGAACAGCTCTG
AAAGCATTGAAGCTATAAGAGAATATGAAGAAGAGTTTTTTCAGAATTCAAAGCTCCTAAAGACAAGCA
TGCTAAAGGCACACCAAGTGACTACAAGAAATTTAAGCCTTGCAGTATCAGACTGCTTTTGGAAAATGG
TACGAGAGTCTGTTGAACAACAGGCTGATAGTTTCAAAGCAACACGTTTTAACCTTGAAACTGAATGGA
AGAATAACTATCCTCGCCTGCGGGAACTTGACCGGAATGAACTATTTGAAAAAGCTAAAAATGAAATCC
TTGATGAAGTTATCAGTCTGAGCCAGGTTACACCAAAACATTGGGAGGAAATCCTTCAACAATCTTTGT
GGGAAAGAGTATCAACTCATGTGATTGAAAACATCTACCTTCCAGCTGCGCAGACCATGAATTCAGGAA
CTTTTAACACCACAGTGGATATCAAGCTTAAACAGTGGACTGATAAACAACTTCCTAATAAAGCAGTAG
AGGTTGCTTGGGAGACCCTACAAGAAGAATTTTCCCGCTTTATGACAGAACCGAAAGGGAAAGAGCATG
ATGACATATTTGATAAACTTAAAGAGGCTGTTAAGGAAGAAAGTATTAAACGACACAAGTGGAATGACT
TTGCGGAGGACAGCTTGAGGGTTATTCAACACAATGCTTTGGAAGACCGATCCATATCTGATAAACAGC
AATGGGATGCAGCTATTTATTTTATGGAAGAGGCTCTGCAGGCTCGTCTCAAGGATACTGAAAATGCAA
TTGAAAACATGGTGGGTCCAGACTGGAAAAAGAGGTGGTTATACTGGAAGAATCGGACCCAAGAACAGT
GTGTTCACAATGAAACCAAGAATGAATTGGAGAAGATGTTGAAATGTAATGAGGAGCACCCAGCTTATC
TTGCAAGTGATGAAATAACCACAGTCCGGAAGAACCTTGAATCCCGAGGAGTAGAAGTAGATCCAAGCT
TGATTAAGGATACTTGGCATCAAGTTTATAGAAGACATTTTTTAAAAACAGCTCTAAACCATTGTAACC
TTTGTCGAAGAGGTTTTTATTACTACCAAAGGCATTTTGTAGATTCTGAGTTGGAATGCAATGATGTGG
TCTTGTTTTGGCGTATACAGCGCATGCTTGCTATCACCGCAAATACTTTAAGGCAACAACTTACAAATA
CTGAAGTTAGGCGATTAGAGAAAAATGTTAAAGAGGTATTGGAAGATTTTGCTGAAGATGGTGAGAAGA
AGATTAAATTGCTTACTGGTAAACGCGTTCAACTGGCGGAAGACCTCAAGAAAGTTAGAGAAATTCAAG
AAAAACTTGATGCTTTCATTGAAGCTCTTCATCAGGAGAAATAAATTAAAATCGTACTCATAATCAGCT
CTGCATACATCTGAAGAACAAAAACATCAACGTCTTTTGTCCAGCCTCTTTTTCTTCTGCTGTTCCACC
TTTCTAAACATACAATAAAGTCATGGGATAAAAATAATCGATGTATGTTACGGGCGCTTTAACCATCAG
CTGCCTCTCGAATGGAAGAACAGTGGTAATGGATTAACATCCTATTTTGTTGTACTAAAGTGACAAATC
GGAATAATATAATTGGTATGGCCATTAGGTTCAGTCCTTGAAGATAAGAAACTTGTTCTCTGTTTGTTG
TCTTATTTGTGGTGGCACTCGTTTAATGGATTAACTGAGGTTGCTCAATGTTCAGTTTCTTTTCCAGAA
ATACAATGCTAGGTGTTTTGAAATAAAACTTATATAGCAATTGTTTAAAGTTATCAATTGTATATAAAA
TCACAGTAGCCTGCTAAATCATTGTATGTGTCTGTAGTATTCTATTCCCAGAAACTATTTGACCATGAT
AATTCAGTTTATATTCACCACATGAAAGAAAAATGGGTAACAGAAGAACCCTTAAAACAGGTTAATTTG
GATTGTAACGTTCAGTGAAAGAAATTTCAACCCTTCATAGCCAGCGAAGAAATTTGCCTTGGAAGCCAA
GTCAGTACCAGCTTACCTATTTGATTCAGTTGCTGTTTTCTCACTCTCTATATCCATTTGAAATTGATT
TATTTTAGATGTTGTATACTTACGTTAGGCTTTCTGTTAATAGTGGTTTTTCTCCTGTTGACAGAGCCA
CCGGATTATGACACAGGATGAGGAAGATTAAGGATAATCAATTGACTAATTTCATTTAGAATATTATCA
AACATTTCAACTAGGTATCAGAAAAAGGCTTTCTTTCATAAGACTATTTTAAATAGAAATTATTTCAAC
AATTAAAGTAATGTTGACCATCCCCCTCTCAGCTGAATAAAGAAAAATTTAGTTCAATTTATTGCAATT
TAATTACAATACTACCTTCACAACATTTTCATGTGTTTTAAATAAATATTTTTTAATTGGCTAAAGGAC
ATTCAAGCAAAGAAATGCTTTCTTTACTTAAAATGTCTATCTCATTTGCTGCCTTTTCACTAAGCCTTT
ACTTTGTTAATAAAAGTGTCCATTGTGTGATGTTTTTGATTTTACAGTTTGCTAAATCTTATTTTCTTG
GAGTTGCTTTTTGGTAACAGCCCCATTGCTACTCCCCATTTTATTGTTTTACATCAATGCATGCTTCGT
TGTGATCCCTCAAGATGTAACACTTGGTATGCTCGGTTGAGGATATGAAAAAATACTTCCGAAACCAGG
AATTCAATGTATGTTTGTTTTATACTGTTTGATAAGAAAAGTAGGTCCAGCCTTAAGCAGCACAGATGC
GCTGGTAGATGCATAGTCAGGAACTTTTTTTATTTCTTTTAGGTCTAGGGACAGGAGTGAATAGAAAGG
GAGGAGAGCTCTATTATGTTCTATACACAGATTAGGAGATGACCTTACTGGGTACACCCCTCTAACCAG
TGCTTACAGGTTAATGCATGTTAATGAATATTTTTGCAGTTGTAAAGCATAACAATTACAACTACACAT
CTATTTCTAAAGAATAAAACAGGACCATATTTATTTACTTCTGTCAACTATAGAAAGAAAGACCTTCAG
CTGTATTTCCACAGATTTCTCCCAAGGAAAAGGCTAATATTAGTCACTACTGTTATCACATCCCTTTGT
ATAAGTTTTAAAAAGAGATGGAGGGAGATCTTCATTTCTTTGAGGAGATCAGTATTGTAACGTATGTGA
ATAGATGATAACAATTAATATTACTAAAAGTCCCACATGAGAGTCCTGACGCCCTCTCCATGCCCCACA
GTAATGTGGCTTCTTTCATGGGTTTTTTTTTCTTCTTTTTAGCTGATCTCATCCTAAGCATGCTTTATT
TTTCCTTGAAAGCTAGGTATTTATCAACTGCAGATGTTATTGAAAGAAAATAAAATTCAGTCTCAAGAG
TAAACCCTGTGTCTTGTGTCTGTAGTTCAAAAGTCAGAAATGATTCTAATTTAAACAAAAAGATACTAA
ATATACAGAAGTTAAATTCGAACTAGCCACAGAATCATTTGTTTTTATGTCAGAATTTGCAAAGAGTGG
AGTGGACAAAGCTCTGTATGGAAGACTGAACAACTGTAAATAGATGATATCCAAACTTAATTTGGCTAG
GACTTCAATTTTAAAAATCAGTGTACCTAGGCAGTGCACAGCACGAAATAAGTGGCCCTTGCAGCTTCC
CCGTTTAACCCACTGTGCTATAGTTGCGGGTGGAACAGTCAACCTTTCTAGTAGTTTATGATATTGCCC
TCTTTGTATTCCCATTTTCTACAGTTTTTTCCGCAGACTTCTTTCTGCAAATTATTCAGCCTCCAAATG
CAAATGAATGATATAAAAATAAGTAGGGAACATGGCAGAGAGTGGTGCTTCCCAGCCTCACAATGTGGG
AATTTGACATAGGATGAGAGTCAGAGTATAGGTTTAAAAGATAAAATCTTTAGTTAATAATTTTGTATT
TATTTATTCTAGATGTATGTATCTGAGGAAAGAAATCTGGTATTTTTGCTTTCCAATAAAGGGGATCAA
AGTAATGGTTTTTCTCTCAGTTCTCTAAGCTGGTCTATGTTATAGCTCTAGCAGTATGGAAATGTGCTT
TAAAATATGCTTACCTTTTGAATGATCATGGCTATATGTTGTTGAGATATTTGAAACTTACCTTGTTTT
CACTTGTGCACTGTGAATGAACTTTGTATTATTTTTTTAAAACCTTCACATTACGTGTAGATATTATTG
CAACTTATATTTTGCCTGAGCTTGATCAAAGGTCATTTGTGTAGATGAGTAATTAAAAAATATTTAAAT
CACATTATAATTCTATTATTGGAGAGCATCTTTTAAATTTTTTTCTGTTTTAACGAGGGAAAGAGAAAC
CTGTATACCTAGGGTCATTATTTGACCCCATAGTATAACCAGATTCATGGTCTAACAAGCTCTCAGTGT
GGCTTTTCTCTGAATGCTTGAATTTCACATGCCTTGCATTTCACAGTTGTACTCCATGGTCAACCGGTG
CTTTTTTTCACATCGTGGTACTTGTCAAAACATTTTGTTATTTTCCTTGGTAAAATATATAAAAAAGGT
TTTCTAATTTCA
ENST00000392436.7, SEQ ID NO: 1259, organism: homo sapiens
AAGTCCATGCGCCATTGGGAGGGCCTCGGCCGCGGCTCTGTGCCCTTGCTGCTGAGGGCCACTTCCTGG
GTCATTCCTGGACCGGGAGCCGGGCTGGGGCTCACACGGGGGCTCCCGCGTGGCCGTCTCGGCGCCTGC
GTGACCTCCCCGCCGGCGGGATGTGGCGACTACGTCGGGCCGCTGTGGCCTGTGAGGTCTGCCAGTCTT
TAGTGAAACACAGCTCTGGAATAAAAGGAAGTTTACCACTACAAAAACTACATCTGGTTTCACGAAGCA
TTTATCATTCACATCATCCTACCTTAAAGCTTCAACGACCCCAATTAAGGACATCCTTTCAGCAGTTCT
CTTCTCTGACAAACCTTCCTTTACGTAAACTGAAATTCTCTCCAATTAAATATGGCTACCAGCCTCGCA
GGAATTTTTGGCCAGCAAGATTAGCTACGAGACTCTTAAAACTTCGCTATCTCATACTAGGATCGGCTG
TTGGGGGTGGCTACACAGCCAAAAAGACTTTTGATCAGTGGAAAGATATGATACCGGACCTTAGTGAAT
ATAAATGGATTGTGCCTGACATTGTGTGGGAAATTGATGAGTATATCGATTTTGAGAAAATTAGAAAAG
CCCTTCCTAGTTCAGAAGACCTTGTAAAGTTAGCACCAGACTTTGACAAGATTGTTGAAAGCCTTAGCT
TATTGAAGGACTTTTTTACCTCAGGTTCTCCGGAAGAAACGGCGTTTAGAGCAACAGATCGTGGATCTG
AAAGTGACAAGCATTTTAGAAAGGTGTCAGACAAAGAGAAAATTGACCAACTTCAGGAAGAACTTCTGC
ACACTCAGTTGAAGTATCAGAGAATCTTGGAACGATTAGAAAAGGAGAACAAAGAATTGAGAAAATTAG
TATTGCAGAAAGATGACAAAGGCATTCATCATAGAAAGCTTAAGAAATCTTTGATTGACATGTATTCTG
AAGTTCTTGATGTTCTCTCTGATTATGATGCCAGTTATAATACGCAAGATCATCTGCCACGGGTTGTTG
TGGTTGGAGATCAGAGTGCTGGAAAGACTAGTGTGTTGGAAATGATTGCCCAAGCTCGAATATTCCCAA
GAGGATCTGGGGAGATGATGACACGTTCTCCAGTTAAGGTGACTCTGAGTGAAGGTCCTCACCATGTGG
CCCTATTTAAAGATAGTTCTCGGGAGTTTGATCTTACCAAAGAAGAAGATCTTGCAGCATTAAGACATG
AAATAGAACTTCGAATGAGGAAAAATGTGAAAGAAGGCTGTACCGTTAGCCCTGAGACCATATCCTTAA
ATGTAAAAGGCCCTGGACTACAGAGGATGGTGCTTGTTGACTTACCAGGTGTGATTAATACTGTGACAT
CAGGCATGGCTCCTGACACAAAGGAAACTATTTTCAGTATCAGCAAAGCTTACATGCAGAATCCTAATG
CCATCATACTGTGTATTCAAGATGGATCTGTGGATGCTGAACGCAGTATTGTTACAGACTTGGTCAGTC
AAATGGACCCTCATGGAAGGAGAACCATATTCGTTTTGACCAAAGTAGACCTGGCAGAGAAAAATGTAG
CCAGTCCAAGCAGGATTCAGCAGATAATTGAAGGAAAGCTCTTCCCAATGAAAGCTTTAGGTTATTTTG
CTGTTGTAACAGGAAAAGGGAACAGCTCTGAAAGCATTGAAGCTATAAGAGAATATGAAGAAGAGTTTT
TTCAGAATTCAAAGCTCCTAAAGACAAGCATGCTAAAGGCACACCAAGTGACTACAAGAAATTTAAGCC
TTGCAGTATCAGACTGCTTTTGGAAAATGGTACGAGAGTCTGTTGAACAACAGGCTGATAGTTTCAAAG
CAACACGTTTTAACCTTGAAACTGAATGGAAGAATAACTATCCTCGCCTGCGGGAACTTGACCGGAATG
AACTATTTGAAAAAGCTAAAAATGAAATCCTTGATGAAGTTATCAGTCTGAGCCAGGTTACACCAAAAC
ATTGGGAGGAAATCCTTCAACAATCTTTGTGGGAAAGAGTATCAACTCATGTGATTGAAAACATCTACC
TTCCAGCTGCGCAGACCATGAATTCAGGAACTTTTAACACCACAGTGGATATCAAGCTTAAACAGTGGA
CTGATAAACAACTTCCTAATAAAGCAGTAGAGGTTGCTTGGGAGACCCTACAAGAAGAATTTTCCCGCT
TTATGACAGAACCGAAAGGGAAAGAGCATGATGACATATTTGATAAACTTAAAGAGGCTGTTAAGGAAG
AAAGTATTAAACGACACAAGTGGAATGACTTTGCGGAGGACAGCTTGAGGGTTATTCAACACAATGCTT
TGGAAGACCGATCCATATCTGATAAACAGCAATGGGATGCAGCTATTTATTTTATGGAAGAGGCTCTGC
AGGCTCGTCTCAAGGATACTGAAAATGCAATTGAAAACATGGTGGGTCCAGACTGGAAAAAGAGGTGGT
TATACTGGAAGAATCGGACCCAAGAACAGTGTGTTCACAATGAAACCAAGAATGAATTGGAGAAGATGT
TGAAATGTAATGAGGAGCACCCAGCTTATCTTGCAAGTGATGAAATAACCACAGTCCGGAAGAACCTTG
AATCCCGAGGAGTAGAAGTAGATCCAAGCTTGATTAAGGATACTTGGCATCAAGTTTATAGAAGACATT
TTTTAAAAACAGCTCTAAACCATTGTAACCTTTGTCGAAGAGGTTTTTATTACTACCAAAGGCATTTTG
TAGATTCTGAGTTGGAATGCAATGATGTGGTCTTGTTTTGGCGTATACAGCGCATGCTTGCTATCACCG
CAAATACTTTAAGGCAACAACTTACAAATACTGAAGTTAGGCGATTAGAGAAAAATGTTAAAGAGGTAT
TGGAAGATTTTGCTGAAGATGGTGAGAAGAAGATTAAATTGCTTACTGGTAAACGCGTTCAACTGGCGG
AAGACCTCAAAATGTTCTTTTTCCCCAGCTCGGACTCAACACTACACACCAGGCCACCACATGGCGCCG
CACCCAGCATTGACACTTCTTTTACCTTGTCTGGGCTCTGACATCCGTGCCAGGTTGCTCTTCGTCATG
GAGTCCCTTTTACTGAGCTCTGCTCTGACGCTTTGTGCCAGGTGCCTCTCCATCTCATCCTTCCCACCC
GCTAGCCTCTGCCCGACCCCAGACAGATTCCTTCCTCACCTGAAGCCAGACCATGCCTTTGTGGAGATA
CCCTCTTTACCCTGCCTGTGCTTCGCCAGCCTGCACCAGGCCACCCTCCTGCACAGATACTCTCCTCAG
TACTGGACCAGGCTACCAACAGCCCCATGTGAACCCATTGTAACCCAGGTCAGGCATTAACACCTGCAG
TAGGCTACCATGGCTTCCCCTTCCCACCCCCCTAGCTTGGCCCTACTAATAATCACTTTGTCACTGTTT
GGGGTTGATATTTGGTTGTTTCTTGTAGGTTCCTAGCTTTAAGATAGGATTGCATACTAAAATTTACTT
AGATCTTTGAGAACTCAAGGAAATCAGTGAAACATTATTGTTATTAAATAAAAATAAAAT
ENST00000646793.1, SEQ ID NO: 1260, organism: homo sapiens
GGCCGCGGCTCTGTGCCCTTGCTGCTGAGGGCCACTTCCTGGGTCATTCCTGGACCGGGAGCCGGGCTG
GGGCTCACACGGGGGCTCCCGCGTGGCCGTCTCGGCGCCTGCGTGACCTCCCCGCCGGCGGGATGTGGC
GACTACGTCGGGCCGCTGTGGCCTGTGAGGTCTGCCAGTCTTTAGTGAAACACAGCTCTGGAATAAAAG
GAAGTTTACCACTACAAAAACTACATCTGGTTTCACGAAGCATTTATCATTCACATCATCCTACCTTAA
AGCTTCAACGACCCCAATTAAGGACATCCTTTCAGCAGTTCTCTTCTCTGACAAACCTTCCTTTACGTA
AACTGAAATTCTCTCCAATTAAATATGGCTACCAGCCTCGCAGGAATTTTTGGCCAGCAAGATTAGCTA
CGAGACTCTTAAAACTTCGCTATCTCATACTAGGATCGGCTGTTGGGGGTGGCTACACAGCCAAAAAGA
CTTTTGATCAGTGGAAAGATATGATACCGGACCTTAGTGAATATAAATGGATTGTGCCTGACATTGTGT
GGGAAATTGATGAGTATATCGATTTTGGTTCTCCGGAAGAAACGGCGTTTAGAGCAACAGATCGTGGAT
CTGAAAGTGACAAGCATTTTAGAAAGGTGTCAGACAAAGAGAAAATTGACCAACTTCAGGAAGAACTTC
TGCACACTCAGTTGAAGTATCAGAGAATCTTGGAACGATTAGAAAAGGAGAACAAAGAATTGAGAAAAT
TAGTATTGCAGAAAGATGACAAAGGCATTCATCATAGAAAGCTTAAGAAATCTTTGATTGACATGTATT
CTGAAGTTCTTGATGTTCTCTCTGATTATGATGCCAGTTATAATACGCAAGATCATCTGCCACGGGTTG
TTGTGGTTGGAGATCAGAGTGCTGGAAAGACTAGTGTGTTGGAAATGATTGCCCAAGCTCGAATATTCC
CAAGAGGATCTGGGGAGATGATGACACGTTCTCCAGTTAAGGTGACTCTGAGTGAAGGTCCTCACCATG
TGGCCCTATTTAAAGATAGTTCTCGGGAGTTTGATCTTACCAAAGAAGAAGATCTTGCAGCATTAAGAC
ATGAAATAGAACTTCGAATGAGGAAAAATGTGAAAGAAGGCTGTACCGTTAGCCCTGAGACCATATCCT
TAAATGTAAAAGGCCCTGGACTACAGAGGATGGTGCTTGTTGACTTACCAGGTGTGATTAATACTGTGA
CATCAGGCATGGCTCCTGACACAAAGGAAACTATTTTCAGTATCAGCAAAGCTTACATGCAGAATCCTA
ATGCCATCATACTGTGTATTCAAGATGGATCTGTGGATGCTGAACGCAGTATTGTTACAGACTTGGTCA
GTCAAATGGACCCTCATGGAAGGAGAACCATATTCGTTTTGACCAAAGTAGACCTGGCAGAGAAAAATG
TAGCCAGTCCAAGCAGGATTCAGCAGATAATTGAAGGAAAGCTCTTCCCAATGAAAGCTTTAGGTTATT
TTGCTGTTGTAACAGGAAAAGGGAACAGCTCTGAAAGCATTGAAGCTATAAGAGAATATGAAGAAGAGT
TTTTTCAGAATTCAAAGCTCCTAAAGACAAGCATGCTAAAGGCACACCAAGTGACTACAAGAAATTTAA
GCCTTGCAGTATCAGACTGCTTTTGGAAAATGGTACGAGAGTCTGTTGAACAACAGGCTGATAGTTTCA
AAGCAACACGTTTTAACCTTGAAACTGAATGGAAGAATAACTATCCTCGCCTGCGGGAACTTGACCGGA
ATGAACTATTTGAAAAAGCTAAAAATGAAATCCTTGATGAAGTTATCAGTCTGAGCCAGGTTACACCAA
AACATTGGGAGGAAATCCTTCAACAATCTTTGTGGGAAAGAGTATCAACTCATGTGATTGAAAACATCT
ACCTTCCAGCTGCGCAGACCATGAATTCAGGAACTTTTAACACCACAGTGGATATCAAGCTTAAACAGT
GGACTGATAAACAACTTCCTAATAAAGCAGTAGAGGTTGCTTGGGAGACCCTACAAGAAGAATTTTCCC
GCTTTATGACAGAACCGAAAGGGAAAGAGCATGATGACATATTTGATAAACTTAAAGAGGCTGTTAAGG
AAGAAAGTATTAAACGACACAAGTGGAATGACTTTGCGGAGGACAGCTTGAGGGTTATTCAACACAATG
CTTTGGAAGACCGATCCATATCTGATAAACAGCAATGGGATGCAGCTATTTATTTTATGGAAGAGGCTC
TGCAGGCTCGTCTCAAGGATACTGAAAATGCAATTGAAAACATGGTGGGTCCAGACTGGAAAAAGAGGT
GGTTATACTGGAAGAATCGGACCCAAGAACAGTGTGTTCACAATGAAACCAAGAATGAATTGGAGAAGA
TGTTGAAATGTAATGAGGAGCACCCAGCTTATCTTGCAAGTGATGAAATAACCACAGTCCGGAAGAACC
TTGAATCCCGAGGAGTAGAAGTAGATCCAAGCTTGATTAAGGATACTTGGCATCAAGTTTATAGAAGAC
ATTTTTTAAAAACAGCTCTAAACCATTGTAACCTTTGTCGAAGAGGTTTTTATTACTACCAAAGGCATT
TTGTAGATTCTGAGTTGGAATGCAATGATGTGGTCTTGTTTTGGCGTATACAGCGCATGCTTGCTATCA
CCGCAAATACTTTAAGGCAACAACTTACAAATACTGAAGTTAGGCGATTAGAGAAAAATGTTAAAGAGG
TATTGGAAGATTTTGCTGAAGATGGTGAGAAGAAGATTAAATTGCTTACTGGTAAACGCGTTCAACTGG
CGGAAGACCTCAAGAAAGTTAGAGAAATTCAAGAAAAACTTGATGCTTTCATTGAAGCTCTTCATCAGG
AGAAATAAATTAAAATCGTACTCATAATCAGCTCTGCATACATCTGAAGAACAAAAACATCAACGTCTT
TTGTCCAGCCTCTTTTTCTTCTGCTGTTCCACCTTTCTAAACATACAATAAAGTCATGGGATAAAAATA
ATCGATGTATGTTACGGGCGCTTTAACCATCAGCTGCCTCTCGAATGGAAGAACAGTGGTAATGGATTA
ACATCCTATTTTGTTGTACTAAAGTGACAAATCGGAATAATATAATTGGTATGGCCATTAGGTTCAGTC
CTTGAAGATAAGAAACTTGTTCTCTGTTTGTTGTCTTATTTGTGGTGGCACTCGTTTAATGGATTAACT
GAGGTTGCTCAATGTTCAGTTTCTTTTCCAGAAATACAATGCTAGGTGTTTTGAAATAAAACTTATATA
GCAATTGTTTAAAGTTATCAATTGTATATAAAATCACAGTAGCCTGCTAAATCATTGTATGTGTCTGTA
GTATTCTATTCCCAGAAACTATTTGACCATGATAATTCAGTTTATATTCACCACATGAAAGAAAAATGG
GTAACAGAAGAACCCTTAAAACAGGTTAATTTGGATTGTAACGTTCAGTGAAAGAAATTTCAACCCTTC
ATAGCCAGCGAAGAAATTTGCCTTGGAAGCCAAGTCAGTACCAGCTTACCTATTTGATTCAGTTGCTGT
TTTCTCACTCTCTATATCCATTTGAAATTGATTTATTTTAGATGTTGTATACTTACGTTAGGCTTTCTG
TTAATAGTGGTTTTTCTCCTGTTGACAGAGCCACCGGATTATGACACAGGATGAGGAAGATTAAGGATA
ATCAATTGACTAATTTCATTTAGAATATTATCAAACATTTCAACTAGGTATCAGAAAAAGGCTTTCTTT
CATAAGACTATTTTAAATAGAAATTATTTCAACAATTAAAGTAATGTTGACCATCCCCCTCTCAGCTGA
ATAAAGAAAAATTTAGTTCAATTTATTGCAATTTAATTACAATACTACCTTCACAACATTTTCATGTGT
TTTAAATAAATATTTTTTAATTGGCTAAAGGACATTCAAGCAAAGAAATGCTTTCTTTACTTAAAATGT
CTATCTCATTTGCTGCCTTTTCACTAAGCCTTTACTTTGTTAATAAAAGTGTCCATTGTGTGATGTTTT
TGATTTTACAGTTTGCTAAATCTTATTTTCTTGGAGTTGCTTTTTGGTAACAGCCCCATTGCTACTCCC
CATTTTATTGTTTTACATCAATGCATGCTTCGTTGTGATCCCTCAAGATGTAACACTTGGTATGCTCGG
TTGAGGATATGAAAAAATACTTCCGAAACCAGGAATTCAATGTATGTTTGTTTTATACTGTTTGATAAG
AAAAGTAGGTCCAGCCTTAAGCAGCACAGATGCGCTGGTAGATGCATAGTCAGGAACTTTTTTTATTTC
TTTTAGGTCTAGGGACAGGAGTGAATAGAAAGGGAGGAGAGCTCTATTATGTTCTATACACAGATTAGG
AGATGACCTTACTGGGTACACCCCTCTAACCAGTGCTTACAGGTTAATGCATGTTAATGAATATTTTTG
CAGTTGTAAAGCATAACAATTACAACTACACATCTATTTCTAAAGAATAAAACAGGACCATATTTATTT
ACTTCTGTCAACTATAGAAAGAAAGACCTTCAGCTGTATTTCCACAGATTTCTCCCAAGGAAAAGGCTA
ATATTAGTCACTACTGTTATCACATCCCTTTGTATAAGTTTTAAAAAGAGATGGAGGGAGATCTTCATT
TCTTTGAGGAGATCAGTATTGTAACGTATGTGAATAGATGATAACAATTAATATTACTAAAAGTCCCAC
ATGAGAGTCCTGACGCCCTCTCCATGCCCCACAGTAATGTGGCTTCTTTCATGGGTTTTTTTTTCTTCT
TTTTAGCTGATCTCATCCTAAGCATGCTTTATTTTTCCTTGAAAGCTAGGTATTTATCAACTGCAGATG
TTATTGAAAGAAAATAAAATTCAGTCTCAAGAGTAAACCCTGTGTCTTGTGTCTGTAGTTCAAAAGTCA
GAAATGATTCTAATTTAAACAAAAAGATACTAAATATACAGAAGTTAAATTCGAACTAGCCACAGAATC
ATTTGTTTTTATGTCAGAATTTGCAAAGAGTGGAGTGGACAAAGCTCTGTATGGAAGACTGAACAACTG
TAAATAGATGATATCCAAACTTAATTTGGCTAGGACTTCAATTTTAAAAATCAGTGTACCTAGGCAGTG
CACAGCACGAAATAAGTGGCCCTTGCAGCTTCCCCGTTTAACCCACTGTGCTATAGTTGCGGGTGGAAC
AGTCAACCTTTCTAGTAGTTTATGATATTGCCCTCTTTGTATTCCCATTTTCTACAGTTTTTTCCGCAG
ACTTCTTTCTGCAAATTATTCAGCCTCCAAATGCAAATGAATGATATAAAAATAAGTAGGGAACATGGC
AGAGAGTGGTGCTTCCCAGCCTCACAATGTGGGAATTTGACATAGGATGAGAGTCAGAGTATAGGTTTA
AAAGATAAAATCTTTAGTTAATAATTTTGTATTTATTTATTCTAGATGTATGTATCTGAGGAAAGAAAT
CTGGTATTTTTGCTTTCCAATAAAGGGGATCAAAGTAATGGTTTTTCTCTCAGTTCTCTAAGCTGGTCT
ATGTTATAGCTCTAGCAGTATGGAAATGTGCTTTAAAATATGCTTACCTTTTGAATGATCATGGCTATA
TGTTGTTGAGATATTTGAAACTTACCTTGTTTTCACTTGTGCACTGTGAATGAACTTTGTATTATTTTT
TTAAAACCTTCACATTACGTGTAGATATTATTGCAACTTATATTTTGCCTGAGCTTGATCAAAGGTCAT
TTGTGTAGATGAGTAATTAAAAAATATTTAAATC
ENST00000392437.6, SEQ ID NO: 1261, organism: homo sapiens
ACTTCCTGGGTCATTCCTGGACCGGGAGCCGGGCTGGGGCTCACACGGGGGCTCCCGCGTGGCCGTCTC
GGCGCCTGCGTGACCTCCCCGCCGGCGGGATGTGGCGACTACGTCGGGCCGCTGTGGCCTGTGAGGTCT
GCCAGTCTTTAGTGAAACACAGCTCTGGAATAAAAGGAAGTTTACCACTACAAAAACTACATCTGGTTT
CACGAAGCATTTATCATTCACATCATCCTACCTTAAAGCTTCAACGACCCCAATTAAGGACATCCTTTC
AGCAGTTCTCTTCTCTGACAAACCTTCCTTTACGTAAACTGAAATTCTCTCCAATTAAATATGGCTACC
AGCCTCGCAGGAATTTTTGGCCAGCAAGATTAGCTACGAGACTCTTAAAACTTCGCTATCTCATACTAG
GATCGGCTGTTGGGGGTGGCTACACAGCCAAAAAGACTTTTGATCAGTGGAAAGATATGATACCGGACC
TTAGTGAATATAAATGGATTGTGCCTGACATTGTGTGGGAAATTGATGAGTATATCGATTTTGAGAAAA
TTAGAAAAGCCCTTCCTAGTTCAGAAGACCTTGTAAAGTTAGCACCAGACTTTGACAAGATTGTTGAAA
GCCTTAGCTTATTGAAGGACTTTTTTACCTCAGGTCACAAATTGGTTAGTGAAGTCATAGGAGCTTCTG
ACCTACTTCTCTTGTTAGGTTCTCCGGAAGAAACGGCGTTTAGAGCAACAGATCGTGGATCTGAAAGTG
ACAAGCATTTTAGAAAGGTGTCAGACAAAGAGAAAATTGACCAACTTCAGGAAGAACTTCTGCACACTC
AGTTGAAGTATCAGAGAATCTTGGAACGATTAGAAAAGGAGAACAAAGAATTGAGAAAATTAGTATTGC
AGAAAGATGACAAAGGCATTCATCATAGAAAGCTTAAGAAATCTTTGATTGACATGTATTCTGAAGTTC
TTGATGTTCTCTCTGATTATGATGCCAGTTATAATACGCAAGATCATCTGCCACGGGTTGTTGTGGTTG
GAGATCAGAGTGCTGGAAAGACTAGTGTGTTGGAAATGATTGCCCAAGCTCGAATATTCCCAAGAGGAT
CTGGGGAGATGATGACACGTTCTCCAGTTAAGGTGACTCTGAGTGAAGGTCCTCACCATGTGGCCCTAT
TTAAAGATAGTTCTCGGGAGTTTGATCTTACCAAAGAAGAAGATCTTGCAGCATTAAGACATGAAATAG
AACTTCGAATGAGGAAAAATGTGAAAGAAGGCTGTACCGTTAGCCCTGAGACCATATCCTTAAATGTAA
AAGGCCCTGGACTACAGAGGATGGTGCTTGTTGACTTACCAGGTGTGATTAATACTGTGACATCAGGCA
TGGCTCCTGACACAAAGGAAACTATTTTCAGTATCAGCAAAGCTTACATGCAGAATCCTAATGCCATCA
TACTGTGTATTCAAGATGGATCTGTGGATGCTGAACGCAGTATTGTTACAGACTTGGTCAGTCAAATGG
ACCCTCATGGAAGGAGAACCATATTCGTTTTGACCAAAGTAGACCTGGCAGAGAAAAATGTAGCCAGTC
CAAGCAGGATTCAGCAGATAATTGAAGGAAAGCTCTTCCCAATGAAAGCTTTAGGTTATTTTGCTGTTG
TAACAGGAAAAGGGAACAGCTCTGAAAGCATTGAAGCTATAAGAGAATATGAAGAAGAGTTTTTTCAGA
ATTCAAAGCTCCTAAAGACAAGCATGCTAAAGGCACACCAAGTGACTACAAGAAATTTAAGCCTTGCAG
TATCAGACTGCTTTTGGAAAATGGTACGAGAGTCTGTTGAACAACAGGCTGATAGTTTCAAAGCAACAC
GTTTTAACCTTGAAACTGAATGGAAGAATAACTATCCTCGCCTGCGGGAACTTGACCGGAATGAACTAT
TTGAAAAAGCTAAAAATGAAATCCTTGATGAAGTTATCAGTCTGAGCCAGGTTACACCAAAACATTGGG
AGGAAATCCTTCAACAATCTTTGTGGGAAAGAGTATCAACTCATGTGATTGAAAACATCTACCTTCCAG
CTGCGCAGACCATGAATTCAGGAACTTTTAACACCACAGTGGATATCAAGCTTAAACAGTGGACTGATA
AACAACTTCCTAATAAAGCAGTAGAGGTTGCTTGGGAGACCCTACAAGAAGAATTTTCCCGCTTTATGA
CAGAACCGAAAGGGAAAGAGCATGATGACATATTTGATAAACTTAAAGAGGCTGTTAAGGAAGAAAGTA
TTAAACGACACAAGTGGAATGACTTTGCGGAGGACAGCTTGAGGGTTATTCAACACAATGCTTTGGAAG
ACCGATCCATATCTGATAAACAGCAATGGGATGCAGCTATTTATTTTATGGAAGAGGCTCTGCAGGCTC
GTCTCAAGGATACTGAAAATGCAATTGAAAACATGGTGGGTCCAGACTGGAAAAAGAGGTGGTTATACT
GGAAGAATCGGACCCAAGAACAGTGTGTTCACAATGAAACCAAGAATGAATTGGAGAAGATGTTGAAAT
GTAATGAGGAGCACCCAGCTTATCTTGCAAGTGATGAAATAACCACAGTCCGGAAGAACCTTGAATCCC
GAGGAGTAGAAGTAGATCCAAGCTTGATTAAGGATACTTGGCATCAAGTTTATAGAAGACATTTTTTAA
AAACAGCTCTAAACCATTGTAACCTTTGTCGAAGAGGTTTTTATTACTACCAAAGGCATTTTGTAGATT
CTGAGTTGGAATGCAATGATGTGGTCTTGTTTTGGCGTATACAGCGCATGCTTGCTATCACCGCAAATA
CTTTAAGGCAACAACTTACAAATACTGAAGTTAGGCGATTAGAGAAAAATGTTAAAGAGGTATTGGAAG
ATTTTGCTGAAGATGGTGAGAAGAAGATTAAATTGCTTACTGGTAAACGCGTTCAACTGGCGGAAGACC
TCAAGAAAGTTAGAGAAATTCAAGAAAAACTTGATGCTTTCATTGAAGCTCTTCATCAGGAGAAATAAA
TTAAAATCGTACTCATAATCAGCTCTGCATACATCTGAAGAACAAAAACATCAACGTCTTTTGTCCAGC
CTCTTTTTCTTCTGCTGTTCCACCTTTCTAAACATACAATAAAGTCATGGGATAAAAATAATCGATGTA
TGTTACGGGCGCTTTAACCATCAGCTGCCTCTCGAATGGAAGAACAGTGGTAATGGATTAACATCCTAT
TTTGTTGTACTAAAGTGACAAATCGGAATAATATAATTGGTATGGCCATTAGGTTCAGTCCTTGAAGAT
AAGAAACTTGTTCTCTGTTTGTTGTCTTATTTGTGGTGGCACTCGTTTAATGGATTAACTGAGGTTGCT
CAATGTTCAGTTTCTTTTCCAGAAATACAATGCTAGGTGTTTTGAAATAAAACTTATATAGCAATTGTT
TAAAGTTATCAATTGTATATAAAATCACAGTAGCCTGCTAAATCATTGTATGTGTCTGTAGTATTCTAT
TCCCAGAAACTATTTGACCATGATAATTCAGTTTATATTCACCACATGAAAGAAAAATGGGTAACAGAA
GAACCCTTAAAACAGGTTAATTTGGATTGTAACGTTCAGTGAAAGAAATTTCAACCCTTCATAGCCAGC
GAAGAAATTTGCCTTGGAAGCCAAGTCAGTACCAGCTTACCTATTTGATTCAGTTGCTGTTTTCTCACT
CTCTATATCCATTTGAAATTGATTTATTTTAGATGTTGTATACTTACGTTAGGCTTTCTGTTAATAGTG
GTTTTTCTCCTGTTGACAGAGCCACCGGATTATGACACAGGATGAGGAAGATTAAGGATAATCAATTGA
CTAATTTCATTTAGAATATTATCAAACATTTCAACTAGGTATCAGAAAAAGGCTTTCTTTCATAAGACT
ATTTTAAATAGAAATTATTTCAACAATTAAAGTAATGTTGACCATCCCCCTCTCAGCTGAATAAAGAAA
AATTTAGTTCAATTTATTGCAATTTAATTACAATACTACCTTCACAACATTTTCATGTGTTTTAAATAA
ATATTTTTTAATTGGC
ENST00000645553.1, SEQ ID NO: 1262, organism: homo sapiens
GGGTCATTCCTGGACCGGGAGCCGGGCTGGGGCTCACACGGGGGCTCCCGCGTGGCCGTCTCGGCGCCT
GCGTGACCTCCCCGCCGGCGGGATGTGGCGACTACGTCGGGCCGCTGTGGCCTGTGAGGTCTGCCAGTC
TTTAGTGAAACACAGCTCTGGAATAAAAGGAAGTTTACCACTACAAAAACTACATCTGGTTTCACGAAG
CATTTATCATTCACATCATCCTACCTTAAAGCTTCAACGACCCCAATTAAGGACATCCTTTCAGCAGTT
CTCTTCTCTGACAAACCTTCCTTTACGTAAACTGAAATTCTCTCCAATTAAATATGGCTACCAGCCTCG
CAGGAATTTTTGGCCAGCAAGATTAGCTACGAGACTCTTAAAACTTCGCTATCTCATACTAGGATCGGC
TGTTGGGGGTGGCTACACAGCCAAAAAGACTTTTGATCAGTGGAAAGATATGATACCGGACCTTAGTGA
ATATAAATGGATTGTGCCTGACATTGTGTGGGAAATTGATGAGTATATCGATTTTGAGAAAATTAGAAA
AGCCCTTCCTAGTTCAGAAGACCTTGTAAAGTTAGCACCAGACTTTGACAAGATTGTTGAAAGCCTTAG
CTTATTGAAGGACTTTTTTACCTCAGGTTCTCCGGAAGAAACGGCGTTTAGAGCAACAGATCGTGGATC
TGAAAGTGACAAGCATTTTAGAAAGGTGTCAGACAAAGAGAAAATTGACCAACTTCAGGAAGAACTTCT
GCACACTCAGAGCAAAATTTGGAAGTTGAAGTATCAGAGAATCTTGGAACGATTAGAAAAGGAGAACAA
AGAATTGAGAAAATTAGTATTGCAGAAAGATGACAAAGGCATTCATCATAGAAAGCTTAAGAAATCTTT
GATTGACATGTATTCTGAAGTTCTTGATGTTCTCTCTGATTATGATGCCAGTTATAATACGCAAGATCA
TCTGCCACGGGTTGTTGTGGTTGGAGATCAGAGTGCTGGAAAGACTAGTGTGTTGGAAATGATTGCCCA
AGCTCGAATATTCCCAAGAGGATCTGGGGAGATGATGACACGTTCTCCAGTTAAGGTGACTCTGAGTGA
AGGTCCTCACCATGTGGCCCTATTTAAAGATAGTTCTCGGGAGTTTGATCTTACCAAAGAAGAAGATCT
TGCAGCATTAAGACATGAAATAGAACTTCGAATGAGGAAAAATGTGAAAGAAGGCTGTACCGTTAGCCC
TGAGACCATATCCTTAAATGTAAAAGGCCCTGGACTACAGAGGATGGTGCTTGTTGACTTACCAGGTGT
GATTAATACTGTGACATCAGGCATGGCTCCTGACACAAAGGAAACTATTTTCAGTATCAGCAAAGCTTA
CATGCAGAATCCTAATGCCATCATACTGTGTATTCAAGATGGATCTGTGGATGCTGAACGCAGTATTGT
TACAGACTTGGTCAGTCAAATGGACCCTCATGGAAGGAGAACCATATTCGTTTTGACCAAAGTAGACCT
GGCAGAGAAAAATGTAGCCAGTCCAAGCAGGATTCAGCAGATAATTGAAGGAAAGCTCTTCCCAATGAA
AGCTTTAGGTTATTTTGCTGTTGTAACAGGAAAAGGGAACAGCTCTGAAAGCATTGAAGCTATAAGAGA
ATATGAAGAAGAGTTTTTTCAGAATTCAAAGCTCCTAAAGACAAGCATGCTAAAGGCACACCAAGTGAC
TACAAGAAATTTAAGCCTTGCAGTATCAGACTGCTTTTGGAAAATGGTACGAGAGTCTGTTGAACAACA
GGCTGATAGTTTCAAAGCAACACGTTTTAACCTTGAAACTGAATGGAAGAATAACTATCCTCGCCTGCG
GGAACTTGACCGGAATGAACTATTTGAAAAAGCTAAAAATGAAATCCTTGATGAAGTTATCAGTCTGAG
CCAGGTTACACCAAAACATTGGGAGGAAATCCTTCAACAATCTTTGTGGGAAAGAGTATCAACTCATGT
GATTGAAAACATCTACCTTCCAGCTGCGCAGACCATGAATTCAGGAACTTTTAACACCACAGTGGATAT
CAAGCTTAAACAGTGGACTGATAAACAACTTCCTAATAAAGCAGTAGAGGTTGCTTGGGAGACCCTACA
AGAAGAATTTTCCCGCTTTATGACAGAACCGAAAGGGAAAGAGCATGATGACATATTTGATAAACTTAA
AGAGGCTGTTAAGGAAGAAAGTATTAAACGACACAAGTGGAATGACTTTGCGGAGGACAGCTTGAGGGT
TATTCAACACAATGCTTTGGAAGACCGATCCATATCTGATAAACAGCAATGGGATGCAGCTATTTATTT
TATGGAAGAGGCTCTGCAGGCTCGTCTCAAGGATACTGAAAATGCAATTGAAAACATGGTGGGTCCAGA
CTGGAAAAAGAGGTGGTTATACTGGAAGAATCGGACCCAAGAACAGTGTGTTCACAATGAAACCAAGAA
TGAATTGGAGAAGATGTTGAAATGTAATGAGGAGCACCCAGCTTATCTTGCAAGTGATGAAATAACCAC
AGTCCGGAAGAACCTTGAATCCCGAGGAGTAGAAGTAGATCCAAGCTTGATTAAGGATACTTGGCATCA
AGTTTATAGAAGACATTTTTTAAAAACAGCTCTAAACCATTGTAACCTTTGTCGAAGAGGTTTTTATTA
CTACCAAAGGCATTTTGTAGATTCTGAGTTGGAATGCAATGATGTGGTCTTGTTTTGGCGTATACAGCG
CATGCTTGCTATCACCGCAAATACTTTAAGGCAACAACTTACAAATACTGAAGTTAGGCGATTAGAGAA
AAATGTTAAAGAGGTATTGGAAGATTTTGCTGAAGATGGTGAGAAGAAGATTAAATTGCTTACTGGTAA
ACGCGTTCAACTGGCGGAAGACCTCAAGAAAGTTAGAGAAATTCAAGAAAAACTTGATGCTTTCATTGA
AGCTCTTCATCAGGAGAAATAAATTAAAATCGTACTCATAATCAGCTCTGCATACATCTGAAGAACAAA
AACATCAACGTCTTTTGTCCAGCCTCTTTTTCTTCTGCTGTTCCACCTTTCTAAACATACAATAAAGTC
ATGGGATAAAAATAATCGATGTATGTTACGGGCGCTTTAACCATCAGCTGCCTCTCGAATGGAAGAACA
GTGGTAATGGATTAACATCCTATTTTGTTGTACTAAAGTGACAAATCGGAATAATATAATTGGTATGGC
CATTAGGTTCAGTCCTTGAAGATAAGAAACTTGTTCTCTGTTTGTTGTCTTATTTGTGGTGGCACTCGT
TTAATGGATTAACTGAGGTTGCTCAATGTTCAGTTTCTTTTCCAGAAATACAATGCTAGGTGTTTTGAA
ATAAAACTTATATAGCAATTGTTTAAAGTTATCAATTGTATATAAAATCACAGTAGCCTGCTAAATCAT
TGTATGTGTCTGTAGTATTCTATTCCCAGAAACTATTTGACCATGATAATTCAGTTTATATTCACCACA
TGAAAGAAAAATGGGTAACAGAAGAACCCTTAAAACAGGTTAATTTGGATTGTAACGTTCAGTGAAAGA
AATTTCAACCCTTCATAGCCAGCGAAGAAATTTGCCTTGGAAGCCAAGTCAGTACCAGCTTACCTATTT
GATTCAGTTGCTGTTTTCTCACTCTCTATATCCATTTGAAATTGATTTATTTTAGATGTTGTATACTTA
CGTTAGGCTTTCTGTTAATAGTGGTTTTTCTCCTGTTGACAGAGCCACCGGATTATGACACAGGATGAG
GAAGATTAAGGATAATCAATTGACTAATTTCATTTAGAATATTATCAAACATTTCAACTAGGTATCAGA
AAAAGGCTTTCTTTCATAAGACTATTTTAAATAGAAATTATTTCAACAATTAAAGTAATGTTGACCATC
CCCCTCTCAGCTGAATAAAGAAAAATTTAGTTCAATTTATTGCAATTTAATTACAATACTACCTTCACA
ACATTTTCATGTGTTTTAAATAAATATTTTTTAATTGGCTAAAGGACATTCAAGCAAAGAAATGCTTTC
TTTACTTAAAATGTCTATCTCATTTGCTGCCTTTTCACTAAGCCTTTACTTTGTTAATAAAAGTGTCCA
TTGTGTGATGTTTTTGATTTTACAGTTTGCTAAATCTTATTTTCTTGGAGTTGCTTTTTGGTAACAGCC
CCATTGCTACTCCCCATTTTATTGTTTTACATCAATGCATGCTTCGTTGTGATCCCTCAAGATGTAACA
CTTGGTATGCTCGGTTGAGGATATGAAAAAATACTTCCGAAACCAGGAATTCAATGTATGTTTGTTTTA
TACTGTTTGATAAGAAAAGTAGGTCCAGCCTTAAGCAGCACAGATGCGCTGGTAGATGCATAGTCAGGA
ACTTTTTTTATTTCTTTTAGGTCTAGGGACAGGAGTGAATAGAAAGGGAGGAGAGCTCTATTATGTTCT
ATACACAGATTAGGAGATGACCTTACTGGGTACACCCCTCTAACCAGTGCTTACAGGTTAATGCATGTT
AATGAATATTTTTGCAGTTGTAAAGCATAACAATTACAACTACACATCTATTTCTAAAGAATAAAACAG
GACCATATTTATTTACTTCTGTCAACTATAGAAAGAAAGACCTTCAGCTGTATTTCCACAGATTTCTCC
CAAGGAAAAGGCTAATATTAGTCACTACTGTTATCACATCCCTTTGTATAAGTTTTAAAAAGAGATGGA
GGGAGATCTTCATTTCTTTGAGGAGATCAGTATTGTAACGTATGTGAATAGATGATAACAATTAATATT
ACTAAAAGTCCCACATGAGAGTCCTGACGCCCTCTCCATGCCCCACAGTAATGTGGCTTCTTTCATGGG
TTTTTTTTTCTTCTTTTTAGCTGATCTCATCCTAAGCATGCTTTATTTTTCCTTGAAAGCTAGGTATTT
ATCAACTGCAGATGTTATTGAAAGAAAATAAAATTCAGTC

TABLE 1.4
List of Exemplary OPA1 mRNA 5′ UTR Sequences

ENST00000361715.6 chr3:193593143-193593377, SEQ ID
NO: 1263, organism: homo sapiens
GTGCTGCCCGCCTAGAAAGGGTGAAGTGGTTGTTTCCGTGACGGACTGAG
TACGGGTGCCTGTCAGGCTCTTGCGGAAGTCCATGCGCCATTGGGAGGGC
CTCGGCCGCGGCTCTGTGCCCTTGCTGCTGAGGGCCACTTCCTGGGTCAT
TCCTGGACCGGGAGCCGGGCTGGGGCTCACACGGGGGCTCCCGCGTGGCC
GTCTCGGCGCCTGCGTGACCTCCCCGCCGGCGGG
ENST00000361150.6 chr3:193593143-193593377, SEQ ID
NO: 1264, organism: homo sapiens
GTGCTGCCCGCCTAGAAAGGGTGAAGTGGTTGTTTCCGTGACGGACTGAG
TACGGGTGCCTGTCAGGCTCTTGCGGAAGTCCATGCGCCATTGGGAGGGC
CTCGGCCGCGGCTCTGTGCCCTTGCTGCTGAGGGCCACTTCCTGGGTCAT
TCCTGGACCGGGAGCCGGGCTGGGGCTCACACGGGGGCTCCCGCGTGGCC
GTCTCGGCGCCTGCGTGACCTCCCCGCCGGCGGG
ENST00000361828.7 chr3:193593143-193593377, SEQ ID
NO: 1265, organism: homo sapiens
GTGCTGCCCGCCTAGAAAGGGTGAAGTGGTTGTTTCCGTGACGGACTGAG
TACGGGTGCCTGTCAGGCTCTTGCGGAAGTCCATGCGCCATTGGGAGGGC
CTCGGCCGCGGCTCTGTGCCCTTGCTGCTGAGGGCCACTTCCTGGGTCAT
TCCTGGACCGGGAGCCGGGCTGGGGCTCACACGGGGGCTCCCGCGTGGCC
GTCTCGGCGCCTGCGTGACCTCCCCGCCGGCGGG
ENST00000361908.8 chr3:193593185-193593377, SEQ ID
NO: 1266, organism: homo sapiens
GGACTGAGTACGGGTGCCTGTCAGGCTCTTGCGGAAGTCCATGCGCCATT
GGGAGGGCCTCGGCCGCGGCTCTGTGCCCTTGCTGCTGAGGGCCACTTCC
TGGGTCATTCCTGGACCGGGAGCCGGGCTGGGGCTCACACGGGGGCTCCC
GCGTGGCCGTCTCGGCGCCTGCGTGACCTCCCCGCCGGCGGG
ENST00000361510.8 chr3:193593207-193593377, SEQ ID
NO: 1267, organism: homo sapiens
AGGCTCTTGCGGAAGTCCATGCGCCATTGGGAGGGCCTCGGCCGCGGCTC
TGTGCCCTTGCTGCTGAGGGCCACTTCCTGGGTCATTCCTGGACCGGGAG
CCGGGCTGGGGCTCACACGGGGGCTCCCGCGTGGCCGTCTCGGCGCCTGC
GTGACCTCCCCGCCGGCGGG
ENST00000392436.7 chr3:193593219-193593377, SEQ ID
NO: 1268, organism: homo sapiens
AAGTCCATGCGCCATTGGGAGGGCCTCGGCCGCGGCTCTGTGCCCTTGCT
GCTGAGGGCCACTTCCTGGGTCATTCCTGGACCGGGAGCCGGGCTGGGGC
TCACACGGGGGCTCCCGCGTGGCCGTCTCGGCGCCTGCGTGACCTCCCCG
CCGGCGGG
ENST00000646793.1 chr3:193593246-193593377, SEQ ID
NO: 1269, organism: homo sapiens
GGCCGCGGCTCTGTGCCCTTGCTGCTGAGGGCCACTTCCTGGGTCATTCC
TGGACCGGGAGCCGGGCTGGGGCTCACACGGGGGCTCCCGCGTGGCCGTC
TCGGCGCCTGCGTGACCTCCCCGCCGGCGGG
ENST00000392437.6 chr3:193593279-193593377, SEQ ID
NO: 1270, organism: homo sapiens
ACTTCCTGGGTCATTCCTGGACCGGGAGCCGGGCTGGGGCTCACACGGGG
GCTCCCGCGTGGCCGTCTCGGCGCCTGCGTGACCTCCCCGCCGGCGGG
ENST00000645553.1 chr3:193593286-193593377, SEQ ID
NO: 1271, organism: homo sapiens
GGGTCATTCCTGGACCGGGAGCCGGGCTGGGGCTCACACGGGGGCTCCCG
CGTGGCCGTCTCGGCGCCTGCGTGACCTCCCCGCCGGCGGG

TABLE 2
List of Exemplary OPA1 Protein Sequences

ENST00000361715.6, SEQ ID NO: 1272, organism: homo sapiens
MWRLRRAAVACEVCQSLVKHSSGIKGSLPLQKLHLVSRSIYHSHHPTLKLQRPQLRTSFQQFSSLTNLP
LRKLKFSPIKYGYQPRRNFWPARLATRLLKLRYLILGSAVGGGYTAKKTFDQWKDMIPDLSEYKWIVPD
IVWEIDEYIDFGHKLVSEVIGASDLLLLLGSPEETAFRATDRGSESDKHFRKGLLGELILLQQQIQEHE
EEARRAAGQYSTSYAQQKRKVSDKEKIDQLQEELLHTQLKYQRILERLEKENKELRKLVLQKDDKGIHH
RKLKKSLIDMYSEVLDVLSDYDASYNTQDHLPRVVVVGDQSAGKTSVLEMIAQARIFPRGSGEMMTRSP
VKVTLSEGPHHVALFKDSSREFDLTKEEDLAALRHEIELRMRKNVKEGCTVSPETISLNVKGPGLQRMV
LVDLPGVINTVTSGMAPDTKETIFSISKAYMQNPNAIILCIQDGSVDAERSIVTDLVSQMDPHGRRTIF
VLTKVDLAEKNVASPSRIQQIIEGKLFPMKALGYFAVVTGKGNSSESIEAIREYEEEFFQNSKLLKTSM
LKAHQVTTRNLSLAVSDCFWKMVRESVEQQADSFKATRFNLETEWKNNYPRLRELDRNELFEKAKNEIL
DEVISLSQVTPKHWEEILQQSLWERVSTHVIENIYLPAAQTMNSGTFNTTVDIKLKQWTDKQLPNKAVE
VAWETLQEEFSRFMTEPKGKEHDDIFDKLKEAVKEESIKRHKWNDFAEDSLRVIQHNALEDRSISDKQQ
WDAAIYFMEEALQARLKDTENAIENMVGPDWKKRWLYWKNRTQEQCVHNETKNELEKMLKCNEEHPAYL
ASDEITTVRKNLESRGVEVDPSLIKDTWHQVYRRHFLKTALNHCNLCRRGFYYYQRHFVDSELECNDVV
LFWRIQRMLAITANTLRQQLTNTEVRRLEKNVKEVLEDFAEDGEKKIKLLTGKRVQLAEDLKKVREIQE
KLDAFIEALHQEK
ENST00000361150.6, SEQ ID NO: 1273, organism: homo sapiens
MWRLRRAAVACEVCQSLVKHSSGIKGSLPLQKLHLVSRSIYHSHHPTLKLQRPQLRTSFQQFSSLTNLP
LRKLKFSPIKYGYQPRRNFWPARLATRLLKLRYLILGSAVGGGYTAKKTFDQWKDMIPDLSEYKWIVPD
IVWEIDEYIDFGSPEETAFRATDRGSESDKHFRKGLLGELILLQQQIQEHEEEARRAAGQYSTSYAQQK
RKVSDKEKIDQLQEELLHTQLKYQRILERLEKENKELRKLVLQKDDKGIHHRKLKKSLIDMYSEVLDVL
SDYDASYNTQDHLPRVVVVGDQSAGKTSVLEMIAQARIFPRGSGEMMTRSPVKVTLSEGPHHVALFKDS
SREFDLTKEEDLAALRHEIELRMRKNVKEGCTVSPETISLNVKGPGLQRMVLVDLPGVINTVTSGMAPD
TKETIFSISKAYMQNPNAIILCIQDGSVDAERSIVTDLVSQMDPHGRRTIFVLTKVDLAEKNVASPSRI
QQIIEGKLFPMKALGYFAVVTGKGNSSESIEAIREYEEEFFQNSKLLKTSMLKAHQVTTRNLSLAVSDC
FWKMVRESVEQQADSFKATRFNLETEWKNNYPRLRELDRNELFEKAKNEILDEVISLSQVTPKHWEEIL
QQSLWERVSTHVIENIYLPAAQTMNSGTENTTVDIKLKQWTDKQLPNKAVEVAWETLQEEFSRFMTEPK
GKEHDDIFDKLKEAVKEESIKRHKWNDFAEDSLRVIQHNALEDRSISDKQQWDAAIYFMEEALQARLKD
TENAIENMVGPDWKKRWLYWKNRTQEQCVHNETKNELEKMLKCNEEHPAYLASDEITTVRKNLESRGVE
VDPSLIKDTWHQVYRRHFLKTALNHCNLCRRGFYYYQRHFVDSELECNDVVLFWRIQRMLAITANTLRQ
QLTNTEVRRLEKNVKEVLEDFAEDGEKKIKLLTGKRVQLAEDLKKVREIQEKLDAFIEALHQEK
ENST00000361828.7, SEQ ID NO: 1274, organism: homo sapiens
MWRLRRAAVACEVCQSLVKHSSGIKGSLPLQKLHLVSRSIYHSHHPTLKLQRPQLRTSFQQFSSLTNLP
LRKLKFSPIKYGYQPRRNFWPARLATRLLKLRYLILGSAVGGGYTAKKTFDQWKDMIPDLSEYKWIVPD
IVWEIDEYIDFEKIRKALPSSEDLVKLAPDFDKIVESLSLLKDFFTSGSPEETAFRATDRGSESDKHFR
KVSDKEKIDQLQEELLHTQLKYQRILERLEKENKELRKLVLQKDDKGIHHRKLKKSLIDMYSEVLDVLS
DYDASYNTQDHLPRVVVVGDQSAGKTSVLEMIAQARIFPRGSGEMMTRSPVKVTLSEGPHHVALFKDSS
REFDLTKEEDLAALRHEIELRMRKNVKEGCTVSPETISLNVKGPGLQRMVLVDLPGVINTVTSGMAPDT
KETIFSISKAYMQNPNAIILCIQDGSVDAERSIVTDLVSQMDPHGRRTIFVLTKVDLAEKNVASPSRIQ
QIIEGKLFPMKALGYFAVVTGKGNSSESIEAIREYEEEFFQNSKLLKTSMLKAHQVTTRNLSLAVSDCF
WKMVRESVEQQADSFKATRFNLETEWKNNYPRLRELDRNELFEKAKNEILDEVISLSQVTPKHWEEILQ
QSLWERVSTHVIENIYLPAAQTMNSGTFNTTVDIKLKQWTDKQLPNKAVEVAWETLQEEFSRFMTEPKG
KEHDDIFDKLKEAVKEESIKRHKWNDFAEDSLRVIQHNALEDRSISDKQQWDAAIYFMEEALQARLKDT
ENAIENMVGPDWKKRWLYWKNRTQEQCVHNETKNELEKMLKCNEEHPAYLASDEITTVRKNLESRGVEV
DPSLIKDTWHQVYRRHFLKTALNHCNLCRRGFYYYQRHFVDSELECNDVVLFWRIQRMLAITANTLRQQ
LTNTEVRRLEKNVKEVLEDFAEDGEKKIKLLTGKRVQLAEDLKKVREIQEKLDAFIEALHQEK
ENST00000361908.8, SEQ ID NO: 1275, organism: homo sapiens
MWRLRRAAVACEVCQSLVKHSSGIKGSLPLQKLHLVSRSIYHSHHPTLKLQRPQLRTSFQQFSSLTNLP
LRKLKFSPIKYGYQPRRNFWPARLATRLLKLRYLILGSAVGGGYTAKKTFDQWKDMIPDLSEYKWIVPD
IVWEIDEYIDFEKIRKALPSSEDLVKLAPDFDKIVESLSLLKDFFTSGSPEETAFRATDRGSESDKHFR
KGLLGELILLQQQIQEHEEEARRAAGQYSTSYAQQKRKVSDKEKIDQLQEELLHTQLKYQRILERLEKE
NKELRKLVLQKDDKGIHHRKLKKSLIDMYSEVLDVLSDYDASYNTQDHLPRVVVVGDQSAGKTSVLEMI
AQARIFPRGSGEMMTRSPVKVTLSEGPHHVALFKDSSREFDLTKEEDLAALRHEIELRMRKNVKEGCTV
SPETISLNVKGPGLQRMVLVDLPGVINTVTSGMAPDTKETIFSISKAYMQNPNAIILCIQDGSVDAERS
IVTDLVSQMDPHGRRTIFVLTKVDLAEKNVASPSRIQQIIEGKLFPMKALGYFAVVTGKGNSSESIEAI
REYEEEFFQNSKLLKTSMLKAHQVTTRNLSLAVSDCFWKMVRESVEQQADSFKATRFNLETEWKNNYPR
LRELDRNELFEKAKNEILDEVISLSQVTPKHWEEILQQSLWERVSTHVIENIYLPAAQTMNSGTFNTTV
DIKLKQWTDKQLPNKAVEVAWETLQEEFSRFMTEPKGKEHDDIFDKLKEAVKEESIKRHKWNDFAEDSL
RVIQHNALEDRSISDKQQWDAAIYFMEEALQARLKDTENAIENMVGPDWKKRWLYWKNRTQEQCVHNET
KNELEKMLKCNEEHPAYLASDEITTVRKNLESRGVEVDPSLIKDTWHQVYRRHFLKTALNHCNLCRRGF
YYYQRHFVDSELECNDVVLFWRIQRMLAITANTLRQQLTNTEVRRLEKNVKEVLEDFAEDGEKKIKLLT
GKRVQLAEDLKKVREIQEKLDAFIEALHQEK
ENST00000361510.8, SEQ ID NO: 1276, organism: homo sapiens
MWRLRRAAVACEVCQSLVKHSSGIKGSLPLQKLHLVSRSIYHSHHPTLKLQRPQLRTSFQQFSSLTNLP
LRKLKFSPIKYGYQPRRNFWPARLATRLLKLRYLILGSAVGGGYTAKKTFDQWKDMIPDLSEYKWIVPD
IVWEIDEYIDFEKIRKALPSSEDLVKLAPDFDKIVESLSLLKDFFTSGHKLVSEVIGASDLLLLLGSPE
ETAFRATDRGSESDKHFRKGLLGELILLQQQIQEHEEEARRAAGQYSTSYAQQKRKVSDKEKIDQLQEE
LLHTQLKYQRILERLEKENKELRKLVLQKDDKGIHHRKLKKSLIDMYSEVLDVLSDYDASYNTQDHLPR
VVVVGDQSAGKTSVLEMIAQARIFPRGSGEMMTRSPVKVTLSEGPHHVALFKDSSREFDLTKEEDLAAL
RHEIELRMRKNVKEGCTVSPETISLNVKGPGLQRMVLVDLPGVINTVTSGMAPDTKETIFSISKAYMQN
PNAIILCIQDGSVDAERSIVTDLVSQMDPHGRRTIFVLTKVDLAEKNVASPSRIQQIIEGKLFPMKALG
YFAVVTGKGNSSESIEAIREYEEEFFQNSKLLKTSMLKAHQVTTRNLSLAVSDCFWKMVRESVEQQADS
FKATRFNLETEWKNNYPRLRELDRNELFEKAKNEILDEVISLSQVTPKHWEEILQQSLWERVSTHVIEN
IYLPAAQTMNSGTFNTTVDIKLKQWTDKQLPNKAVEVAWETLQEEFSRFMTEPKGKEHDDIFDKLKEAV
KEESIKRHKWNDFAEDSLRVIQHNALEDRSISDKQQWDAAIYFMEEALQARLKDTENAIENMVGPDWKK
RWLYWKNRTQEQCVHNETKNELEKMLKCNEEHPAYLASDEITTVRKNLESRGVEVDPSLIKDTWHQVYR
RHFLKTALNHCNLCRRGFYYYQRHFVDSELECNDVVLFWRIQRMLAITANTLRQQLTNTEVRRLEKNVK
EVLEDFAEDGEKKIKLLTGKRVQLAEDLKKVREIQEKLDAFIEALHQEK
ENST00000392436.7, SEQ ID NO: 1277, organism: homo sapiens
MWRLRRAAVACEVCQSLVKHSSGIKGSLPLQKLHLVSRSIYHSHHPTLKLQRPQLRTSFQQFSSLTNLP
LRKLKFSPIKYGYQPRRNFWPARLATRLLKLRYLILGSAVGGGYTAKKTFDQWKDMIPDLSEYKWIVPD
IVWEIDEYIDFEKIRKALPSSEDLVKLAPDFDKIVESLSLLKDFFTSGSPEETAFRATDRGSESDKHFR
KVSDKEKIDQLQEELLHTQLKYQRILERLEKENKELRKLVLQKDDKGIHHRKLKKSLIDMYSEVLDVLS
DYDASYNTQDHLPRVVVVGDQSAGKTSVLEMIAQARIFPRGSGEMMTRSPVKVTLSEGPHHVALFKDSS
REFDLTKEEDLAALRHEIELRMRKNVKEGCTVSPETISLNVKGPGLQRMVLVDLPGVINTVTSGMAPDT
KETIFSISKAYMQNPNAIILCIQDGSVDAERSIVTDLVSQMDPHGRRTIFVLTKVDLAEKNVASPSRIQ
QIIEGKLFPMKALGYFAVVTGKGNSSESIEAIREYEEEFFQNSKLLKTSMLKAHQVTTRNLSLAVSDCF
WKMVRESVEQQADSFKATRFNLETEWKNNYPRLRELDRNELFEKAKNEILDEVISLSQVTPKHWEEILQ
QSLWERVSTHVIENIYLPAAQTMNSGTFNTTVDIKLKQWTDKQLPNKAVEVAWETLQEEFSRFMTEPKG
KEHDDIFDKLKEAVKEESIKRHKWNDFAEDSLRVIQHNALEDRSISDKQQWDAAIYFMEEALQARLKDT
ENAIENMVGPDWKKRWLYWKNRTQEQCVHNETKNELEKMLKCNEEHPAYLASDEITTVRKNLESRGVEV
DPSLIKDTWHQVYRRHFLKTALNHCNLCRRGFYYYQRHFVDSELECNDVVLFWRIQRMLAITANTLRQQ
LTNTEVRRLEKNVKEVLEDFAEDGEKKIKLLTGKRVQLAEDLKMFFFPSSDSTLHTRPPHGAAPSIDTS
FTLSGL
ENST00000646793.1, SEQ ID NO: 1278, organism: homo sapiens
MWRLRRAAVACEVCQSLVKHSSGIKGSLPLQKLHLVSRSIYHSHHPTLKLQRPQLRTSFQQFSSLTNLP
LRKLKFSPIKYGYQPRRNFWPARLATRLLKLRYLILGSAVGGGYTAKKTFDQWKDMIPDLSEYKWIVPD
IVWEIDEYIDFGSPEETAFRATDRGSESDKHFRKVSDKEKIDQLQEELLHTQLKYQRILERLEKENKEL
RKLVLQKDDKGIHHRKLKKSLIDMYSEVLDVLSDYDASYNTQDHLPRVVVVGDQSAGKTSVLEMIAQAR
IFPRGSGEMMTRSPVKVTLSEGPHHVALFKDSSREFDLTKEEDLAALRHEIELRMRKNVKEGCTVSPET
ISLNVKGPGLQRMVLVDLPGVINTVTSGMAPDTKETIFSISKAYMQNPNAIILCIQDGSVDAERSIVTD
LVSQMDPHGRRTIFVLTKVDLAEKNVASPSRIQQIIEGKLFPMKALGYFAVVTGKGNSSESIEAIREYE
EEFFQNSKLLKTSMLKAHQVTTRNLSLAVSDCFWKMVRESVEQQADSFKATRFNLETEWKNNYPRLREL
DRNELFEKAKNEILDEVISLSQVTPKHWEEILQQSLWERVSTHVIENIYLPAAQTMNSGTFNTTVDIKL
KQWTDKQLPNKAVEVAWETLQEEFSRFMTEPKGKEHDDIFDKLKEAVKEESIKRHKWNDFAEDSLRVIQ
HNALEDRSISDKQQWDAAIYFMEEALQARLKDTENAIENMVGPDWKKRWLYWKNRTQEQCVHNETKNEL
EKMLKCNEEHPAYLASDEITTVRKNLESRGVEVDPSLIKDTWHQVYRRHFLKTALNHCNLCRRGFYYYQ
RHFVDSELECNDVVLFWRIQRMLAITANTLRQQLTNTEVRRLEKNVKEVLEDFAEDGEKKIKLLTGKRV
QLAEDLKKVREIQEKLDAFIEALHQEK
ENST00000392437.6, SEQ ID NO: 1279, organism: homo sapiens
MWRLRRAAVACEVCQSLVKHSSGIKGSLPLQKLHLVSRSIYHSHHPTLKLQRPQLRTSFQQFSSLTNLP
LRKLKFSPIKYGYQPRRNFWPARLATRLLKLRYLILGSAVGGGYTAKKTFDQWKDMIPDLSEYKWIVPD
IVWEIDEYIDFEKIRKALPSSEDLVKLAPDFDKIVESLSLLKDFFTSGHKLVSEVIGASDLLLLLGSPE
ETAFRATDRGSESDKHFRKVSDKEKIDQLQEELLHTQLKYQRILERLEKENKELRKLVLQKDDKGIHHR
KLKKSLIDMYSEVLDVLSDYDASYNTQDHLPRVVVVGDQSAGKTSVLEMIAQARIFPRGSGEMMTRSPV
KVTLSEGPHHVALFKDSSREFDLTKEEDLAALRHEIELRMRKNVKEGCTVSPETISLNVKGPGLQRMVL
VDLPGVINTVTSGMAPDTKETIFSISKAYMQNPNAIILCIQDGSVDAERSIVTDLVSQMDPHGRRTIFV
LTKVDLAEKNVASPSRIQQIIEGKLFPMKALGYFAVVTGKGNSSESIEAIREYEEEFFQNSKLLKTSML
KAHQVTTRNLSLAVSDCFWKMVRESVEQQADSFKATRFNLETEWKNNYPRLRELDRNELFEKAKNEILD
EVISLSQVTPKHWEEILQQSLWERVSTHVIENIYLPAAQTMNSGTFNTTVDIKLKQWTDKQLPNKAVEV
AWETLQEEFSRFMTEPKGKEHDDIFDKLKEAVKEESIKRHKWNDFAEDSLRVIQHNALEDRSISDKQQW
DAAIYFMEEALQARLKDTENAIENMVGPDWKKRWLYWKNRTQEQCVHNETKNELEKMLKCNEEHPAYLA
SDEITTVRKNLESRGVEVDPSLIKDTWHQVYRRHFLKTALNHCNLCRRGFYYYQRHFVDSELECNDVVL
FWRIQRMLAITANTLRQQLTNTEVRRLEKNVKEVLEDFAEDGEKKIKLLTGKRVQLAEDLKKVREIQEK
LDAFIEALHQEK
ENST00000645553.1, SEQ ID NO: 1280, organism: homo sapiens
MWRLRRAAVACEVCQSLVKHSSGIKGSLPLQKLHLVSRSIYHSHHPTLKLQRPQLRTSFQQFSSLTNLP
LRKLKFSPIKYGYQPRRNFWPARLATRLLKLRYLILGSAVGGGYTAKKTFDQWKDMIPDLSEYKWIVPD
IVWEIDEYIDFEKIRKALPSSEDLVKLAPDFDKIVESLSLLKDFFTSGSPEETAFRATDRGSESDKHFR
KVSDKEKIDQLQEELLHTQSKIWKLKYQRILERLEKENKELRKLVLQKDDKGIHHRKLKKSLIDMYSEV
LDVLSDYDASYNTQDHLPRVVVVGDQSAGKTSVLEMIAQARIFPRGSGEMMTRSPVKVTLSEGPHHVAL
FKDSSREFDLTKEEDLAALRHEIELRMRKNVKEGCTVSPETISLNVKGPGLQRMVLVDLPGVINTVTSG
MAPDTKETIFSISKAYMQNPNAIILCIQDGSVDAERSIVTDLVSQMDPHGRRTIFVLTKVDLAEKNVAS
PSRIQQIIEGKLFPMKALGYFAVVTGKGNSSESIEAIREYEEEFFQNSKLLKTSMLKAHQVTTRNLSLA
VSDCFWKMVRESVEQQADSFKATRFNLETEWKNNYPRLRELDRNELFEKAKNEILDEVISLSQVTPKHW
EEILQQSLWERVSTHVIENIYLPAAQTMNSGTFNTTVDIKLKQWTDKQLPNKAVEVAWETLQEEFSRFM
TEPKGKEHDDIFDKLKEAVKEESIKRHKWNDFAEDSLRVIQHNALEDRSISDKQQWDAAIYFMEEALQA
RLKDTENAIENMVGPDWKKRWLYWKNRTQEQCVHNETKNELEKMLKCNEEHPAYLASDEITTVRKNLES
RGVEVDPSLIKDTWHQVYRRHFLKTALNHCNLCRRGFYYYQRHFVDSELECNDVVLFWRIQRMLAITAN
TLRQQLTNTEVRRLEKNVKEVLEDFAEDGEKKIKLLTGKRVQLAEDLKKVREIQEKLDAFIEALHQEK

TABLE 3
Sequences of exemplary target introns in pre-mRNA transcripts.

| | SEQ ID | |
|---|---|---|
| Gene | NO. | Intron |
| OPA1 | 2 | Intron 6: |
| organism: | | gtgatggatggtttaagggggctaccgatacattcacactaatcagccatttc |
| homo | | tgccaagatcatgtcacctcaatctgttcatggactccaaatacaagaaatta |
| sapiens | | atttgacaaagtgaaaatataaaagatgcatcatataaatatgtaacttttct |
| | | ggagtgggtagtataggtaaagccaaaagaaacaaattcaagcagaggaattt |
| | | tggtttctgaaaattaggttgtctgtagggtccctgtatttatacttagaaca |
| | | aaattaggaatttctgtttatgtggtccagttattgagtcaccctaagtttgt |
| | | aggcatcttacctacctacttgctccccaagtttttatttctaaaatgaaaag |
| | | cattgctgtagatgaccagtttacactaaagaataacatttatttatttgttt |
| | | tagctaaagtatatggacagggaacattcatattcttgtagaagaaaattatt |
| | | ttgacttttgggcaaaagcatgtagttcttatacactttgacaaactcattgc |
| | | gtacatttttcacattaatcaaagtcagcacaaataaattttcaccttggacc |
| | | acggagggtttgaacactggaaatttgatataattctggttgctaaagaacaa |
| | | gttctaataaaagcttaagtgtataccaatatgtggctgttggtgcaatcagc |
| | | aggtccgtaaaaatatgattttaatggttaggtaatcccacaacggagatccc |
| | | aaagttcatgtttggaagagacttttgggtcaaagtgaaatcagtgtaatgaa |
| | | tttaaaattatactctgagatcttgaaatcagctaattatgttacatcttatt |
| | | agctcagaaaagttttgaagttatatacaaatgctagtcaggaaaaaagattc |
| | | agtcatgtaattcttgtacattctactatttaaatcaaccaatattatagatt |
| | | atgatttagtgcagtaattctgctggctaaccttatctcatttggtggtggtt |
| | | agtacttcagagtactcaccatagtttcatttatgttttcagcatcacttcct |
| | | ggtttttctcaattccatggctgtggaatcaattcatatgtatatttagcttc |
| | | ggtgagcaaaaacatagctagaaaaagaaaagaagtgagtttcctacctggtt |
| | | aaattaaagtcgatgtgttaagccaaggaggacttcttttgaatggtacttta |
| | | acaatccctgttctgtatactgtgaatatatcatttaaatagcctaataaatt |
| | | ggatgcttaggctgagccacctatactttagttttgttatggaaagaagggag |
| | | aggagcaagtatgttcttatatgttacttagaaataagaatgtagctgtagtt |
| | | acacattgttcttaagtttttttcgtaagacaacttgaaatgagtcccatagg |
| | | cctgctatttaacattctaagatatgacttaaggttaatgatgagcttttgaa |
| | | tctgacaattcaagagatatccataatgaatactgattcattttctacattgc |
| | | tgaaagctaatgttcattttaagcctactttagtagcctttatttgggcttag |
| | | agatgttattcctctttctgatatttattgggttatctgtttaacccttttat |
| | | atctccctttcccgatttgtaaattagagactggcaagactttttaccctgag |
| | | tagagcaccaaacatggcttgtttctgcccacactgtagttaccttgagggga |
| | | agtaaatgggactttaaaagcaatttatgctcttttatagtgaaattatccct |
| | | cttactatcccgaaagactgttaccttacaatatcctccactcctttccccct |
| | | gtagttactatagagatgacttttcggttcttcactgccataatgatcaaaat |
| | | cctaattcatgagatttttatcattccaggcatgtgaggtttacttgatgcat |
| | | aaaaccgcaagtactttttgttgttttttaattgttttttctctcttatcttc |
| | | ttgaaagtctaagtagatcatcatttttgatgtcttattagtagcaactaata |
| | | aattttccctgtatcttctcagcaaaagaactcaagcagagacagaagattag |
| | | aactaccattggtagttttgcttcctatggatatgttcacatacatagaaatt |
| | | tttacaatgacctttttatatatgtatttcagaatttcagaatggcctcaatg |
| | | ccttaataggaagaaatacttgaaatttttaaattagggcttggttttgtgag |
| | | gagctagtaaaggtttttctctttcagctttagcttgtttctgcggaggattc |
| | | cgctctttctccatcagtttcatagccctggaattgtagaaaagctctggttt |
| | | caagaccattgatatccatttctgtcagggtgagttttaaatttatttcatga |
| | | tgcaaacaatatattgaacaacaggacatgaacttgttcttgttgtaagtggc |
| | | tgaattttatcagtaaagcacatcaaaataaaatataccccaattgctagtta |
| | | agacctagagtgacagattgaaaatagcttgtgttattctcttaagaaaatat |
| | | ataaaaattatcatctcatcaatctttaatgtttgttttataaatctaaatgt |
| | | ttttatattgtttcctaggaaatattaggtctaattttttactttaccaccag |
| | | ctgtcttttattttactctttttttgagacggagtttcgctcttgttgcttag |
| | | gctagagtgcagtggcactatctcagctcactgcgacctctgcctcccgggtt |
| | | caagcgattctcctgcctcagtctcccgagtagctgggattacaggcacatgc |
| | | cactacaccaggctaattttgtatttttagtagagacggggtttcttcatgtt |
| | | ggtcaggctggtctcgaactcccgacctcaggtgatccgcctgcctcggcctc |
| | | ccagagtgctgggattacaggcatgagccaccgcacctggccagctgtctttt |
| | | aatataacattatgattaattgtgatgttccattaaactaagcggagaggaaa |
| | | catgctggtaaaccatgtgtgagttattcattgtaccagaaaggcaaatgata |
| | | cattttatcctaaaattcaaatttataaacatcttaacacttgtgatcattaa |
| | | atactactaatctagcatataaattatatttgtaggcggggcacggtggctca |
| | | cgcctgtaatcccagcactttgggaggctgaggtgggcagatcacgaggtcag |
| | | gagatcgagaccatcctggctaacatggtgaaaccccatctctactaaaaata |
| | | caaaaaaaattagctgggtgtgctggcgggcacctgtagtcccagctacttgg |
| | | gaggctgaggcaggagaatggcgtgaccccaggaggcagagcttccagcctgg |
| | | gcgactccgtctcaaaaaaaaagaaaaaagaaattatatttgtaatattctac |
| | | taaccttatatcattttaactttttatataacttttttattttaccaaattaa |
| | | gttaaccttttatagcccttggcttatactaaacatcctaacttttttgttta |
| | | attgtattagtttttaagttattgccccagatgtcaagtaatgttggattttc |
| | | tataataatttaggatatattgcatgaagtcagttagtatttacatttaaaac |
| | | taaaacaatttatactaatacagtttatacatttcatactaatttagctacag |
| | | ttggataaatatttaatggaacaaagtaaatcaaagtaccttttcaaatgaat |
| | | tggaaattaaatccacataacaattttttatgaccacactattacagtgtgat |
| | | ggcatgccaaatgatcataatgtggaattatgtatttcttcattggctttcaa |
| | | gattctgttctttagtttgtgggctcctctccaacttgcttgtctcctcacag |
| | | tttaggcgactgtttataattcttgtccatcctgcataaacacacacagtcaa |
| | | aatgaaaaaaagcttctatcagcagatctgtgcttgctgtacagaaatgggaa |
| | | aacaattgaagtttgcattatcttttttctaattaccagatcgtttttggagc |
| | | tatttaggcatacgcttttaaggaaaaaagaaaaaaagagtgtaccttttgtt |
| | | tctaacaaaggttgttatctatattattgaaataaaaaattggggatagttat |
| | | gacaaagtatttagaaataggaattaaaatcttaaaataacttttcatagcat |
| | | ggacaagacttattaatgtctacctcaataagcaaatcatttaaaaatttttc |
| | | atgtatatttgctgccatgatgtgttgtgattgcttaaataaccaatgaatga |
| | | agatcaacaaggatttaaatgaagaagaatatggatttaactattttctcctg |
| | | tgaaataagttcatatttacaagttttgattttcagaaattagacaattattt |
| | | ttaaaggctgggatgacaacttctgcctcttaccaagaagtcaaagcacagtt |
| | | atgtgaattcatcataaatcacatcatttttattatattttgtatttataatt |
| | | gtattgtgactactttaaaacctgttataaaataaaattgttttttaatattt |
| | | tattttagaattattagcattaataacaatttgaagtagtttacacaatacct |
| | | gtgagttttatttttgttttatattgaaattaattttagttgctttacttggc |
| | | ttcattgctatggatgcattctctgtgttacgagttagcagatctttccttgg |
| | | aactgaatttaaaagcaagcatttggctccacttaaatctctgaaaatgcaac |
| | | ttgttctttgcatttattacataattcgctacttatggtacagaaatggatac |
| | | aatacaaaaatatttccttataagatacactgtgaccaatgagctttttaaat |
| | | agctgtaatcagtaacatgtatttgacttttcaaaacacatttctggagggat |
| | | atcagtgctttatttccccaaatatctgaatccctatgctttagtacaaaaca |
| | | acttctgaagaatttagtaaccatatgtgttgatctcttgtttttctaactag |
| | | tctttcataagaaatgactagaatagcaacagggaaatgattgccttttaagg |
| | | tttttgtttctcaatataaaattttggtgaaccatttttattgataaatacag |
| | | gtatttttactttcttaaatcacttgatttaaaattactttgattaaatatgc |
| | | atataaagtcagttgtttttaactctcaatacttatcaaaaaaatttaacttg |
| | | ctgtacattctgtataaacctaattctattcaactaaaattattttaaacatt |
| | | tag |
| | 3 | Intron 28: |
| | | gtgagtagttcttactgccctctaccttactacctttccacctttcccatttc |
| | | catttgtttgttgatccatttaatctcaaacttacagaaaagttacaaggaac |
| | | tgggctgagcacggtggctcacgcttgtaatcccagcactttgggaggccaag |
| | | atgggtggaaaacaaggtcagaagatcaagaccatcctggctaacacagtgaa |
| | | accccgtctctactaaaaatacaaaaaacttagccaggtgtggtggtgggtgc |
| | | ctatagtcccagctacttgggaggctgaggcaggagaatggtgtgaacccggg |
| | | aggcggagcttgcggtgagccaagatcctgccactgcactccagcctgagcga |
| | | cagggcgagattctgtctcaaaaaaaaaaaaaaaaaaaaagttacaaggaatt |
| | | tttttcttctctgaagtatttgagagtaagttgctgaccttaagtcctatcac |
| | | ttccaagtaggttcatgtatagttcttagaaacagattttctcatagcaaccg |
| | | aacattgataaattacaatatctaattctcagacccctttcaagtttcacccg |
| | | ttgtcccagtattatccctccatataacaagatgttccaggctcaatacctga |
| | | cccagcttcctttttttgaagaatggtgtttagaaatggagacctagaaatta |
| | | tatatgctgttattggaatatcactgttccctggtttctcagtggaaagagct |
| | | aggaactaagtgttgtgaatgtttgtgtgtgtgcaggtgaatatacacacact |
| | | gacatctgtattcctaaatcatgtgtatatttatttattaaaaactgtgagtt |
| | | gatgctgatacttcccattttaatccagcattacaaggtttgttctagtgttc |
| | | tccctttcgatatttgtcacttgctttcctgatagaaaacgggcttctagtat |
| | | ccttaatatattttcatattttggtcagtcctcctatacgtaacccaacttga |
| | | atgaagatatgtccttttccattgcagaaatgttctttttccccagctcggac |
| | | tcaacactacacaccaggccaccacatggcgccgcacccagcattgacacttc |
| | | ttttaccttgtctgggctctgacatccgtgccaggttgctcttcgtcatggag |
| | | tcccttttactgagctctgctctgacgctttgtgccaggtgcctctccatctc |
| | | atccttcccacccgctagcctctgcccgaccccagacagattccttcctcacc |
| | | tgaagccagaccatgcctttgtggagataccctctttaccctgcctgtgcttc |
| | | gccagcctgcaccaggccaccctcctgcacagatactctcctcagtactggac |
| | | caggctaccaacagccccatgtgaacccattgtaacccaggtcaggcattaac |
| | | acctgcagtaggctaccatggcttccccttcccacccccctagcttggcccta |
| | | ctaataatcactttgtcactgtttggggttgatatttggttgtttcttgtagg |
| | | ttcctagctttaagataggattgcatactaaaatttacttagatctttgagaa |
| | | ctcaaggaaatcagtgaaacattattgttattaaataaaaataaaatacctgt |
| | | agttggtacctctgtttgagcctgccttgttacaagtttcactgacttcagct |
| | | tcgtgtaacaaagtatctttttctttcaacgtgtacttaaatttcctgtctta |
| | | ttagttttctgatatctaaaaggaaaaaaagcagatatcgttaataaattaga |
| | | aagaagttctgcaaatttaaaagtgccttctaagctgagttgtaggattacag |
| | | tacaatccatagggttatcctgaagaagccaggcagggctcttctgtgttaca |
| | | ccctgtgcctgcgcagcatgctcaccccttgccatcagcgcttgcggccccat |
| | | tctctccctctagtaataatctaagttctgcattgctttctcctttccttttc |
| | | tttcttcctttaaatattcttctttcgagacatatctcattttaacttttatt |
| | | ttcattttctgtcacttttggtttttctcatgccaccttggcaatgtagttaa |
| | | gtttgtgctaacgtagaagattagtgctcaaatctgaattgccatttactact |
| | | agctgtgtcatcttcggcagggaatctcccagagccttagcttctttatttgt |
| | | aaaatgactattatagtggttatttctcaggattgttagaattacttccgcaa |
| | | acatttgcaagtccctggttcataatttcatgctaaattagtaccgttacagg |
| | | aagtggtatatcattgtcacagtgtatacaaatatatttcttttatatccctc |
| | | gtgatataattatcaagacagtgaaacaattcaatgaattttaccagcataac |
| | | acatttttaagtgattggaaaatcataagtatcttttcttatgtttttagtag |
| | | aggctttgcaaccccattactctccgctcccaatttgattatttaaaggaagt |
| | | ggattactaactcagatatgtacactgtcaagccaagttctatgttctactgc |
| | | tggttttcctgagaaagcagtcatataactcccttgaaatgatttactacttt |
| | | tgtacatataaaattataatggtgttaatgtaccaaataatgtccttggaagc |
| | | aagggttttgccagtaactcagctgcatcagtcaccctcaaggagatgagcca |
| | | tgactttgttcattagttggaaaagagtctggagagtgccttttcgttactgt |
| | | ttatctttggtctgacacttgggaatagggtcatggatacttcagccagaaaa |
| | | ctttccaaatttaagttattaatgtattataaggatcaaagtttctagtatag |
| | | cctgttcaattagaacatagtgtgttggttgattggatttggagaaagggagg |
| | | caatcaaatttttactacagtttcagcctgttacagaatattgtatagagtgt |
| | | taaaatgttgatgcattcatatttttgccagttttaagcttgtacgattttaa |
| | | atcatttccttaccttggagacttcccccccacctttttttttttttttgaga |
| | | tggagtctcgctgtgtcgcccaggctagagtgcagtggcacgatctcggctca |
| | | ctgcaaggtggttctcccacctctgcctcccgagtagctggggctacaggcgc |
| | | ccgccaccatgcctggcttattttttgtatttttagtagagacggggtttccc |
| | | catgttagccaggatggtctcgatctcctgacctcatgatccgcccgcctcgg |
| | | cctcccaaagtgctggaattataggcatgagccaccatgcccagccctgactg |
| | | ccctttaagatgagtacataagtagtagtagtacatttttctttcacatcctg |
| | | gagaagatatactgtgttcactattgaaatgaaaccataaagctagagttagg |
| | | aagattgaagaaatgaaaaaggagctcacatgattttgtctcaggagaggctc |
| | | ttccaggattctttggagatatggtagattccatagctggagcagggaaagga |
| | | caggatgagcctgtgggtgtagaaaggaagggagtgcttgaaagatgatgagg |
| | | agatgtcagcaggtcacagaaaccctctgaaggaggctccaactggccaggct |
| | | ggggacaatttgggccccaaaataatgacagtaacaaattgtaactcattgaa |
| | | tgaaataggaatccatacattggtaattatataaataagggaataaaaccatg |
| | | atgcaaaaagggatgtttatgtcatcacgcaaaatatgttcacagaaaatatg |
| | | tactaattaaaagagggaaaagagtaactttacagtggatgaagcctggcaat |
| | | catcactttaagcaagtggtcagagttaatattatcagtaatggtcaaatcaa |
| | | aaccatatgcaagaagactctaaaatgcaagaagactcctgaagtacttctta |
| | | ccaaagatgtagaacttaaattcagtcataacaatacatgagacaaacccaag |
| | | ttagagcacagtctgcaaaataactggcctgtaatcttcaaatgcatcaagat |
| | | catgaaagacaaggaaagagtgaagagctgctccagttggaagagacttaaaa |
| | | ctaaatgcaatgtatgatcctagattggatctttttgctctaaggacattaat |
| | | gggccagttagtgatatttgaaggggatccgagggttccattgtagtaatata |
| | | tcagtgttaatttttaaatttttattaggttgggattattttggaaaatacca |
| | | ttattcatagcgaatacaaagtagaatatttggggatgataatgcatgattac |
| | | aacaaatgtttcaggagaaatatgatctttgtagtggtcttgcaacttttctg |
| | | taagtctgaaattgtttatgcataaaaggttaaaaaaaggttaaattttgttt |
| | | ttataactaataatggattagggtcatgtgaaagtactttagaggaaatgaga |
| | | cttttgagaacatcatccctgaagacgttgaaacactgagttacctcatggat |
| | | aatttaataggatatgcagctgatttttctaccttaatttcttgtttgcagta |
| | | tctacccatacttagaattgtctggtgttaaaatatgcccactgggactttca |
| | | tgaaattcttttgattttctagaaaattcagtttcaaaggattttttaaatag |
| | | atattttaagtttggtgtcaacttagataaaatctgtttggagtcccagtgta |
| | | agttttagtaatgtgtccaatctgtttattgaaatagtataactttagaatac |
| | | tttctttggagagatgaagattggtatgttatagttcaattcaaagttgttct |
| | | ttctattatgatctattttataattcataaaatctatcttatgattgtcatca |
| | | taagtgcaatttgttttttgccccattctacctcagaaactaagtatctgggc |
| | | atcaataacaattggtagtagtgtttgctgctaagccaagtttcaccagtaca |
| | | gtgtggaattattttattgttttttctgtgaacattgtatctgctgttactag |
| | | gttattgtgaggtattgggccttcatagaaattgcctggaacccttgttcact |
| | | aaagcctgttacactttttattctctgtgcgtgtaatcagagacttattgata |
| | | ctgacacattcaaggggcattattgatcatttagattgctctaagacctaagg |
| | | agtcttggccggatgcggtgcctcacgcctgtaatcccagcactatgggaggc |
| | | cgaggcgggtggatcacctgaggtcaggagttcgagatcagcctggccaacat |
| | | ggtgaaaccccgtctctactaaaaatgcgaaaattagctgggcatggtggcag |
| | | gcgcctgtaattccagctactcgggaggctgagacaggagaatcgcctgaacc |
| | | cgggaggcagaggttgcagtgagccaagactgtgccattgcattccagcctgg |
| | | gtaacagagcgagactccatctcaaaaaaaaaaaaaaaacgaaaaacaaaaac |
| | | ctaaggagtcttttctccttattttacaataaattccttttgattttgtgtaa |
| | | aaacttgaaactgtttatgaatgtaaaataacatttgaatacttttcttgtgc |
| | | cagatattaggttaaatgctttatgtgaattttcatttgattctcacaacttt |
| | | tgagttaggtagttatttttctcattttacagatgaaatggagggttaggaac |
| | | tcgtaggtagtagatgctgaagctgagatttgggcctgggtcttttcactact |
| | | gtgccagaatcatttgggagggagtaaaaactcaagcctttggaaaatatgat |
| | | gacataaaattgtcctttatattgagaagcttccatagttaccagtgtccttc |
| | | acagggttgatcggaaagacatacatgttagtgatgatgataatgatgaagat |
| | | aatcattattaccacaggtacttcctataatataagcatctttcaaattgtat |
| | | gagaactttcatagaacatctgagtaaatgaacagtacagtgtgcatgaaacc |
| | | actaagcaaaccaagggaagttaattttctttatatgaattgtaaacatgtct |
| | | ctagatatcctttatcagattccaccatgcgtaagtagtgtctaagttgcccc |
| | | atatttagagtttttcaatgaggttgtgttcctacttagaatcctaaagttca |
| | | gctataacagatatattaataaaatctgtggaatctttaattgagcataatgg |
| | | tggctgttattttaacttgaggctttttgttgagctggattggaagtgcaact |
| | | tattagaaattacagtgtatttattcctatttcttgttctttatgtgagagaa |
| | | gatatactttagtagactgaatacttcagagctgtatctcatttaccaataaa |
| | | atgtgaaaacagtggtaaattccttcacttgggctaccattgtacaggcctat |
| | | tttaatggtatagtttgatatccttaatgttaaaagcaatatagcttaaagag |
| | | gctggtaaattagaattttccaatatcctcagctttttttcctctcacagtta |
| | | atttgctctgctgactccctacgcgaggtggcaacagctggcccttttactgg |
| | | agcttgtggggattagagagtcgggctcgcagcagcgtgctcggcctcttgcc |
| | | tctgttgactgttctttattgtttgatgcctgagcatctcccagacagcgagc |
| | | aattgtttctggaaacttaaagtttgtttctcttgggagtagacaatgctttt |
| | | ggggcttgtctttgtgtttcttcactttcccagtctcctcttatccttcatcc |
| | | tgtgctttctcttgataattagaaaggagcaaagataccacctttttatttag |
| | | gtctgcatgagattctaaaacttagaagtataggctatagatgaaagtttctt |
| | | ttttcagtaagccacctcagtaacaaatcatgttttaaatgaaaactttgttc |
| | | ttcataatatcatttagtgagagaaaacaaatgcatgagtgcatttttgaaat |
| | | tatggtactaaaagggagcagcagcaaggtgacctaatactgccattttaaaa |
| | | gctaggattagaaatgtatcataactgcttaaatctaaaaagattctttcact |
| | | gaatccaaaatatagttctaatttataggatagttataagaaatctctatgcc |
| | | atgtggaaacatgaataaaaagtagtcagaacatagctaaatagaaccctgag |
| | | gtaggcagaatgattttattcttcacatttagaaaagaaaacatcaaggtacc |
| | | ctggaacttaatttctacagtgacttcacattccgacacttctcccatacctg |
| | | ccatacccttgagtgttgttacggatgagaatatcgtctgtgaagtagtatga |
| | | gatggaaattttcctagaaagattattgtactcggaatttggaactgaaaagt |
| | | gtagaaaggggaagtgatgtgtttaaaactgtttgcggaggtggggctctgcc |
| | | atgtgtattttgacaaagctacacaggtgattcttgccatccccgattaccgt |
| | | gtacccgcctgcccctgagctggcactccaaagagttctttcagtgcatagca |
| | | agacaatttttcatgctattaattgggataaaattgacatacattcatttgta |
| | | gagtctgagacacaacgtcactttggaaaatttggtgagcaatttgaactgca |
| | | tctgcactggtgtgttctttttgtttctgtagacttaaccaaagaaaatgaac |
| | | tttaaagggactttaaaggcatctgcactggtgtgttctttttgtttctgtag |
| | | acttaaccaaagaaaatgaattttaaaggaagagagggtgataccaagttgta |
| | | gaattctaggtatgtaggttcagaggagattttttttttttaagaaaaaaaaa |
| | | aaaaaaaaaaaaaacacccaatcaagaagaatagagcagggtgtcccgaagag |
| | | aacgtgtgagctcgaagcatcccggcagcatctttcatatctcagtactgttg |
| | | ctctgtttcttgggctcacaacaccatttcctctctcctggcttttaacacat |
| | | ctcgaggcaaccttttccctttctttttatgcacttctctcactgcgtctctt |
| | | ctatatcatcatcacttcaacctaacccagtatttttatcccacctgcttatt |
| | | taccttccttcagtgactaaaaaccttactcagatactgccagtgttgtttaa |
| | | ttgagcagaatagaggcttctcactataggcaactgtaaatcaatgaaaataa |
| | | ccatttaaagaagaaaaacattttcatgtctatcacggtcgatcccttctgcc |
| | | aaagtgatttggttcattcataaattccccatacctcgtgtgttacatattgt |
| | | actgtacacatttactgaatgttcgattgtgatcttgtaatacagactgttca |
| | | ttagcccccttctcttgacttaaaaagttggggggaactaactcttttcatcc |
| | | caaggaaactttcttctactctgtcttgccagaaagttactgctcatttctct |
| | | tgtagagcagcttgcctgtgtggcattcactcctgttctgcccactcccttcc |
| | | taatatcgtgcagtctggctttcatctatatcaaaaccacttattgatagatc |
| | | accaatgatttcctaatgccagtctacccagttcaccaggaaactttaataac |
| | | tttttatgtttattaggaatttttaagttcattggaatacattcaagtacttt |
| | | ttggaatgattatatgatgtagaaatgtgtatgtttgagagacagaaaaattg |
| | | atttttttttcctcttcactacagaataaataatgtatttgttttatggtagc |
| | | aatacttgaactctttaaggcatcttttcatggtaaatctggcaattttaaaa |
| | | atctgggctttgtaaaataattttttttatagtaaggcagttaacacattaaa |
| | | gcaactaggaaagatagtgaagaattatttttaccttgagtctgtatagatga |
| | | agtaggctctgctttgtgttggaacagaacaaacaaacaaaaaaacctgagtt |
| | | gatacaaagataaagtaatcctcaaggaaagtcctctctgttagagaagtggt |
| | | tatttacacacagaattccacatgacaacgcctgagtggtgtggtttccaggt |
| | | tattgatgagaaaatcgagactcaaaatgggtcttttagaatgaagtacattt |
| | | ttcatggcctaagtctgtctttaaaagtcaccgttgtggccgggtgtggtggc |
| | | tcacgcctgtaatcccagcactttaggaggccaaggtgggcggatcacaaggt |
| | | caggagatccagaccatcctggctaacacagtgaaaccccgtctctactaaaa |
| | | atacaaaaaatttagccaggcgtggtggcgggcgcctgtagtcccagctgctg |
| | | gggaggctgaggcaggagaatggcgtgaacctgggaggcggagcttgcggtga |
| | | gccgagatcgcgccactgcactccagcctgggtgacagagcaagactcgtctc |
| | | aaaaaaaaaaaaaaaaaaaaaaaaagtcactgttgaagaatatcaataaatta |
| | | gtacaagcgtaaaagaacattttcttttctataatattatacatgctgctggt |
| | | aatcaacactttactagcaagtatattcttttgctttaaactcaagttttaac |
| | | tgattaagaataaagacaagaatgttctctacaataatgtatggattgaattt |
| | | gccatttatcattttaatgtaggttttacttatatactattgtgaaaatactc |
| | | ttaatgtattcaaaaggccagtgcacaatttttttttcttttacttctttttt |
| | | ttttttttttttctttagaaagagtgtcacttgctgcccaggctagagtgcag |
| | | tggtgtgatcatggctcactgcagccttgaactcctgggctcaagtgatctaa |
| | | tacctttaaagttgggaataaactttatcttaagcgtttttatttttaaatta |
| | | tgtttttgcatatttgatagaaaaagtagaatgtagtaattgaaaacctaatc |
| | | acaaaacaattcattggactctgcaacagtatataaaaaataaaattaaacga |
| | | gataggaaatcttaagggattggtggattgatgcacatgaaactggtaacctc |
| | | tgttaagtacagttctccaggtagttggagaaattagttaaatgtgaagagaa |
| | | ttttaattttgcactattttgtacatttctaaactgtgtctcccacagccctt |
| | | ctcccccagtgagcacgattcagaattactttgaaatgttgtagtcttaatta |
| | | tcctattcatggaaatgacgaagctaatacacgatgtgctctatcttaaaagt |
| | | aacagatattttcccaagtaacctactgctggttgtgatgctgagggacattt |
| | | catgggactgcatggtcgttgctcatcgtgataccatcctcagtggttggggg |
| | | attcacagtgaattctcatatcctgtaactatgcatcatggatctatcatctg |
| | | aaaataaatcaaaatctttgttgaactcacagtttccacacttgtatcaccca |
| | | tttaagattgtttcattgttacctcctgtgtacagaatatttcatttcaattt |
| | | ctcttagaacagctcattcatctattctctagtttcaatattctgagcagtag |
| | | aagtttgctgttttgattaacttcagttagatctcttttctgggccaagaatt |
| | | aaagccattttatctttagtctctccttttgttggcactgcttcatagactgt |
| | | gtcatatatacagatctgtctttagactgatctttaccaaagtacactactgg |
| | | aatttgagggtttttttttttaacatccttttcattatgagagagctagtgta |
| | | tatgcattgtgggaaattagaaactatagatggcaaaattttaaaaaataatt |
| | | gccaccacccagagattgcactgtagtttaagacacttttgaatgtggtccta |
| | | gggacataatttctggaacacatttttcgtgaagaggtctcaggttggcttct |
| | | tatacccacagctcgttgtcattgcccctagttttaatttcccatcgctcagt |
| | | gggctagattttttttcattttcttcatataaacttatttcagaaatgttcat |
| | | taagaggaataagcagcattagtaaaaatgaaacctatggtacccattacttt |
| | | atatagttcaagtattctggaagccatattgtagcatagcatgtactgaaaat |
| | | cactctcctttgaacagtaatcccatacctgtatttgggacctggccttcctt |
| | | tgtgtgcttgtgtattcattatatcccctttctctcttcaaagatgctcaagt |
| | | cattctcatcttaaaactaatgggttgaaccttccatgcagtctagtagctac |
| | | tgtgaactctaatctctattacaaaggttagctctttgagtctcacttctact |
| | | gaagttgtttttttttcccaagattactgaaaatttaagagaaaataatggcc |
| | | caggcatgcattcaggactagaaaatacttccatgtacagaaaaccaaacacc |
| | | acatgttctcactcataagtgggaattgaacattgagaacacatggacacagg |
| | | gaggggaacagcatacgccagggcctgttggggcgtggggggcgaggggaggg |
| | | aacttagaggacttaagtgcagcagaccaccatggcacacgtatacctgtgta |
| | | gcctgcacattctgcacatagagcccgcttttgtttttgtttttgtttttaag |
| | | aagaaataacggggaaaaaaaaggtttcaaaactcataaagaaagagaaagag |
| | | agggagggagggagggaagaaaatgcttccatgtaactgcatcatttggtact |
| | | ttggagtccatatcctacttgaaactctaggatctggccctcacatttatgta |
| | | gtgctttattttacagtttacaaaacttctgcttgtccatgtgtgtctgtaaa |
| | | gtcatatgaggcattatgcccattgttcagatagagaaattaacgttcattga |
| | | cataaatggttaagcccattatgtaaatatttatggcaaagctggggctaatc |
| | | atatgtgttacagataggactttttttaaagaattgtttaggtattctgttca |
| | | tcattagtctctgggtttgtgtttgtggtaaccatagacaaccaagttcatat |
| | | aatttggcttcttttttatgtgatttttgatacgtgttaaggatctataacaa |
| | | tgaatttgcctcctaaagaggtacataatgttttcattcctccaaaaagataa |
| | | ttctaggtttataaatctatgtatgctcagtgccagttgaattttgtgattgt |
| | | tcaatagaaaagaaattgtgacttaaaggtgattttccagtttaatggaataa |
| | | atgaaattagtttagaagttatttttatttttctgagcctgattctcactcag |
| | | ttgtgataaacagcacctctgtaagataaactcggtgataaaccgagaacttc |
| | | tgaaatcagcctaacatgaatacctgttcttcttgtgctaagtttcataatgc |
| | | tttatcctaatacaccatttttttaagaaatggaacttgtatttcatttttgc |
| | | tttcatctcacctaattcataattttattaaaacctacgatttttaatttctt |
| | | tttttatgaatttttagtttggtgtataaatcagaattacattctctgatctt |
| | | ttacttttaaaattacagtgatgaactgactgtttaagaatcattctcatgat |
| | | tcattcgtctgttatgcctcctttttaaagcttcagcactgaaggtcttttga |
| | | caaaccaatatttataacagtttgacagcaggatgaggaacagcgtttgtctt |
| | | tgtaacagcttgaagaaagaccctttccaggacccagtcatgcagttacaatc |
| | | ttgacctctttcttatgctgggaacatgcatacagcagcacctcccatgtgtt |
| | | ttcttgtcccattgactgtccattcacttcccatctgttttgcagtcttaaag |
| | | gaacagaaggggccttcttataaatctgtctttgcaggtgataaatgatgcct |
| | | acctctttaagagctgcctgggtggttttccttttcttagaacatttctgctt |
| | | tcctcctaactaaatcagggaaaaatacaattttaggaataagagaaaaagaa |
| | | gaaaagatgaatttttaaagcatttaattgactaagaatattttactgatctt |
| | | ttttaatcttcccaattaattgcctaaatcatattttttaaaatgtattatcg |
| | | atatttagatttttgtcagggagtaaaatgaatgtattcattttgaaataatg |
| | | taactcttttttgagaaaacaaagccatgtatcattaatgagttaacatataa |
| | | aataactttttaagttttttgtgataatttaagtgtggagcatcttatgtatt |
| | | ggatacaaaagtaaaatatttcagagtaaatcattgtaatcttatggtaaaat |
| | | ctattcattttttacatttaaaaagatgatcataaatcccataaacatttatg |
| | | cttttacttctgttgctgaaaataagtattgtaggaatagatattgatatcat |
| | | tgggttttctaagaattcagcagaaataaaaataatttactttttctcccatg |
| | | cagaaattatttatgcaaggttttatgtaacaaatattgtccctctatggccc |
| | | tgcagaatattcttaaattactgatttaaaaactattaccagtataaaatgac |
| | | cacttttagaatattgtggtgtattatgtgaatcagctggctaataatatatc |
| | | ttctgtggactagcttgttagtttgtttattaattccctggcatattccaaaa |
| | | ggaatttgaggcagcttacatatatcctacgcaaaagataaaactacttaagt |
| | | gaaaaatttgggttgaaagaaaaggaaaatccaggcaagtgaaataaagtaaa |
| | | ctttcagataaaattggtgcccctcaaagtgcatgctcaagggttctacgtac |
| | | aggcagacctcattgtattgcatgtcactttattgcacttcacagttattgca |
| | | tttttaacaatagaagttttgtggcaaccctgcattgaacaagcctgttggca |
| | | ctattttcccaacagccatgtgctcacctcatgtcactgtcacattttggtaa |
| | | ttcttgcaatatttcaaatttttccattattattctgtctgtcatggtgatct |
| | | ttgatgtttgtattgtagctattttgggtaccactaactgtgcccatattagt |
| | | cagtgaccttaatcagtaaacgtgtgtattctggctgttccaccaactagaca |
| | | ttccctgtctctctcctcctcttcaggcctccctattccataggacacaacaa |
| | | tattgaaatttggccagctaataaccctacaatggcctctacatgttcaagtg |
| | | aaagaaagagtgccatatttcactttaaatcaacaactagaaatgattaagct |
| | | tagtaaaggaggtttgttgaaagccaaaatgggctattagccaaattgtgaat |
| | | gcaaaagaaaagttcttgaaggaaattaaaagtgttattccagtgaacacacg |
| | | aatgataaagcagaacagccttattgcctgagacgcaggaagtttcactggtc |
| | | tggatagaagatcaaaccagccataacattcccttaagctaaaacctaatcca |
| | | gagcaagttcctaactctattcaattctccgaaagctgagaggtgaggaagct |
| | | gcagaataaaatttgaagctagcaaagtttggttcataaggtttaagaggaaa |
| | | aaagccattctgcaacatgaaagtgcaaggtgctgatgtagcagctgcagcaa |
| | | gttatcaagaatatctaactaagataattgatgaaggtgattatactaaacaa |
| | | cagattcttgatgcagatgaagtagctgtctattggaagacgatgccatctag |
| | | taatttaatagctagagagaagtcaatgcccagcttcgaggcttcgaaagaga |
| | | ggctatcccctcattttgggtgccaatgcagcaggtgcctttaagttgaagcc |
| | | aacctaaagaatttaccattctgaaaatcctagggcccttaaggattatgcta |
| | | agtctatcctgcttgttttctaaaagtggaacaaaaagcctggatgacagcac |
| | | atctgtttacagcatggtttactgaatattataactctcgagacctgctcaga |
| | | aaagttttctttcaaaatattactgctcattgacaatgcatctggtcaagcaa |
| | | gagttctgagggagatgtacaaggagatttatgttgtttttgtgcctgctagc |
| | | acaacatccattctgcagcccatggatcaaggaatactttcaaccttgaagtc |
| | | ttattattttaaaaatacgtgtcttaaggccctagctgccatagatagtgatt |
| | | cctctgatggatttaggagaaaaaaaaaggaaaagcttctggaaaggactcac |
| | | cattttagatgctgttaagaccattcaggattcatgggaggaggtcagaatgt |
| | | caccattaacagtttggaagaagttgattccaaccctcatggatgactttgaa |
| | | gagtttgggacttaagaggaggaagtaactgcagatatggtagagacagcaat |
| | | agaactagaattagttctgttgtaatatgataaaacttgaacagatgaaacat |
| | | tgctttttatggacaagcaaagaaagtggtttcttttttcttttttttttttt |
| | | tggcagtctcagtttgaagaaagtggtttcttgagatggaatctgttcctggt |
| | | gaagatgctgtgaacattgttgaaatggcagtaaaggatttagaatattacat |
| | | aaacttagtagataaagcagctgcagggtttgagaagatagtgtcccaatttt |
| | | taaagaagaaaaatttgagtaaatttgggtaaaatttacccaaaattacctat |
| | | tgtgggtaaaatgctatcagacagcatcacatcctactgtgaaatctttcatg |
| | | aaaggaagaatcaatcagtgcagcaaactacaattgttgtcttattttaagaa |
| | | attgccatagccaccgtaacctgcaacagccaccaccctgatcagtcagcagc |
| | | catcaacgtcagggccagaccctccaccagcaaaaagattatgacttgctgaa |
| | | ggctcaggtgatccttagcatttgttagcaataaagtacttttaaataagtta |
| | | tgtacattgtctttttagacataatgctattacacacttaatatattacagta |
| | | tactgtaaacgtaacttaaacgcaccggaaaaccaaaaaaccttatgtgactc |
| | | actttattgtgatatacgctttattgtggcagtctagaaccaaacttgcatat |
| | | ctcccaagtatgctgggactttgctagaggtaagctgcaaatttagccctcag |
| | | tttcctggtggctggcagttacaaaatggaaagcagaggtcattccatcattc |
| | | atggtggccatcagacaacaacacagcagttgcttaggagaagcatgggtctt |
| | | cttcgtacgcacaactgagagaaatttcccttaaagtggacactgagttagat |
| | | gatacaatgaatctaatggctacacataatcatgaaaatcatggggcccttta |
| | | ttgtaatgtttctcatgcgggctaacatgcgtagttctagggaaaatatgatg |
| | | ctgtccaaacatacagctatttggtttggcttatctaaagataaaatacatag |
| | | tatccagagaaatagatgaactgtatgtcctccatacagtctcccataaatat |
| | | tatttctttttgcagctgatccttttagtaaatatcaggtagccagaagttca |
| | | agattttacactcattgacattgacaagcacctggaatggtactacctttttt |
| | | ttttttttttttttttgagacagagtcttgctctgtcacccaggctggagtgc |
| | | agtggcatgatcttggctcactacaacctccgcctcctggattcaagtgattc |
| | | tcctgcctcagcctcccaggtagctgggattacaggcgcccgccactacgccc |
| | | ggctaatttttgtatttttagtagagatgggttttcgccatgttggccagggt |
| | | gatcttgaactcctgacctcatgtgatccacccgcctcggcctcccaaagtgc |
| | | tgggattacaggcgtgagccactgcgcccagccaagtactatttttattagtt |
| | | aagtcagagccataatcattataactgagctgaaattagaattgccatccact |
| | | taagaaagttgagtggtctaacaagtataaaagcctaaatataaggctaattc |
| | | atgttcatactgaagccttttggggaataggccttaaaatatgtagaaagtat |
| | | ttgaagcggttttaattgtactagccaaaaggagcctagtagaaatgcttgtg |
| | | ttataagagtttattttttaaaaagctgaatttatctgaccaggcgcggtggt |
| | | tcacgcctgtaatcccagcactttgggaggccaaggcaggtggatcacgaggt |
| | | caggagtttgagaccagcctagccaatatggtgaaaccccatcactactaaaa |
| | | atacaaaaaaattggccaggcatggtgatgcctgcctgtagtcccagctactc |
| | | cggaggctgaggcagaagaatcatttgaaaccgggaggcggaggttgcagtga |
| | | gccgagattgcgccactgcactccagcctggacgacagagcgagactccatct |
| | | caaaaaaaaaaaaagctgaatttatcaacaaattgctgtggagttttttatat |
| | | attcagcaggcatcagttgtaatttacctcacagactttcttaaggttgcttt |
| | | ctttctaaattatactttatgggggtcacaaaatagcaatttttaaataatca |
| | | cctttaatgattaagtattgtttaagtcagatcactcaactatgaatgcatga |
| | | atattcatggacatctattacatagcaagcagtgctatgctgggccgagtgat |
| | | tttaaatgacagactttttggtaagtagagaatttacccaagcagtccttgct |
| | | gttctccacattaatgctcagaaaaaatacattataaaaatgatctttccaaa |
| | | atgaattatgaagccccatgagaatgatatggcaatttgtggttacatatttt |
| | | actagaggattaatatccaataaataaaaagatactaaggaataaacaaaaaa |
| | | aatttaaaagatgaagtatataatgaattagaacaatacattttaatcataag |
| | | ttttaaattagtgtggactttgaattctcctggacagattccttcattttata |
| | | gataaagctaggactgtgacttatccagttatgaggttaacggcgaatacaac |
| | | attgtcatatattttaaatgacacacattacaacatgttctctgctttataaa |
| | | aatcatatcaaataattgccccatagattattaaaggtgttagactagggatt |
| | | cttaaaaaaaattttcatcaaatgtttctttcattattaatcccatgaagtcc |
| | | atgttacagaagattttgtctacaacagtgcagttacattcttctcgttagaa |
| | | atacaaccaccagttagagttcctaatcagtataaggaagtagttgttaggag |
| | | aggggatgggtttcttgtccaaatgaagttttccatttgagtttttgaagtag |
| | | tgaaactaacccagcgtttacaggccccagaaatctgggaacctcagctttca |
| | | aagtactgtaccagtctttaacagttttcctggacgtgtgaattgatgcctcc |
| | | ttctgtaacatgcaggagtgttctgtctgtcttcattgagtgttaaaaaataa |
| | | tcatgcctatttcaaggaaaaaatctacagaactaagatgcagaagataagtg |
| | | ctagatttaatcatattccttcatctatctgtttggttcaacctttcatcaac |
| | | taaaagatgcaccttttttcttgtgctaactctaagattttagctacagtttt |
| | | gagaatcttgagtgtagtctcttgtttaccttttttcctttttttgtttcccc |
| | | cacaccctagattcatttaaatactgaacttctaaagggcaagtatatagtgt |
| | | agtttaataaaaagcaaaccttttcatgaacaatatatattacataataagaa |
| | | gcgttcctttacttttcagtactctagtgaatagctttctacagtagaatctc |
| | | acttagagggtgtcttaaagcttaacaccaagtgctcaggcagcatgttatac |
| | | aacagttccattaaggtacatttggatctttggatgtgtggtttgcttaaagt |
| | | acactgcattagtaagttggcagcttgctttctttaaaaacatcaaaagtttt |
| | | aaaaggtttatttcagggcatgtgttagtgttttgtgtgtggttctttgttcc |
| | | tgttctaaactgttattaaccactgaagtgaaccttctcccgggtttggcctt |
| | | ttggtattcacagtgtattcaaaacctaattacagattagtctatatttgaga |
| | | cttttagagcaagtatcagaagacccaaaaagaaaatgagagtagcagtatca |
| | | tttcatgtagagataaagagacccaaaacatgaatgggtgtcaagtcagctga |
| | | agaaaagaaaaaagagaaggaacttcattcactgagacggtttatgagttggg |
| | | gattatgggaatattcatgactcaatcaagaagcacagtgaattgatgtttga |
| | | aatagctcatcttttaagtaaacattggataaatggaaagtagactcagtatt |
| | | cactacacgtagaaatagctatttctgtatagcagaaatagcagtttgttaat |
| | | cccttcctgagttggtttaatttaccaagtaaatcacaaattttattctttat |
| | | ttgtgaatatttaattcaaatatttaatggaaatatgagtttgctttataatt |
| | | agtcatgctgatccatacacgtatttctgagagaaagcaatttctaatggtga |
| | | aatagttacaataatatttttgaaatttgaaagcaccgtgatactgaagcatt |
| | | aatctgaaggatcggaaagtagggagtttttgttgccaacatttaacttcatt |
| | | gtttatggataacttggttttctgggcagccagatggcacagttagtatacag |
| | | acattcttggaaacttgtatcaaaatttaaaatgaatgaatttatgagaaata |
| | | attctgcttattatttgtaatgtagctttcttgaaaagcaagaaatcggaatg |
| | | tagtttctaaagctgcaagtgaatatgtatacatagccagctctttcagcctt |
| | | gataataaggtgcaaccattaagatgaagggatttttttttcccacttgtgtt |
| | | tttgggcccgagtatcctgatctgtgttgcttgtctggttcaggtgtgagcca |
| | | ccagctttctttgactttcattatctatgtgtatcttgcctcctgttcccagg |
| | | cttgctctagctcttctgatcctgtcttcctccctcttgatcactagtgtagt |
| | | attcatgaagccagctaagttagtttttccctttgaaaaccacagcccttatc |
| | | ttctgtgccatattttgggcaacttcgtttatcattgattgaccgtacgcagt |
| | | gatcaggccttgttctagacactgaagactctgagcatttttgggcccatttt |
| | | gtactcctgtattgttctccaggggcttctccaagtgtgcgtcaatttagtct |
| | | tctcaagagggcatcattttcatcagaatatgatagcatattatggagtgtcc |
| | | ggtcatccttaggcatagactacttaggaggtgtaactgttttgttccctgat |
| | | ttttactgaaatgggtcttttcttttttttttttttttttttttttttttttt |
| | | ttttttttttttttttgagacagagtctcgctatgtcaccaggctggagtgca |
| | | gtggcatgatctcagctcactgcaacctccgcctcccgattctccctgaaatg |
| | | cgtcttattttaagtcaaaggtaatacttaaaaaagaccaaagagacttaaaa |
| | | taacagcatttgcttcgtcactatgagctttgttattatgagttaacatacag |
| | | tagcagactgggtgtagtagctcacgccctgtaattccagcagtttgtgaagc |
| | | cgagtggggaggattgcttgaggccaagacttcgagaccagcctgggcaacat |
| | | agtgagacccccatcttgacaaaaaaaattgttttaaattagccaggtgtggt |
| | | gctgcatgcctgtggtcccagctacttggaaggctaaggtaggagaatcgctt |
| | | gagcctgggaggtcgaggctgtagtgagccgtgtttgcatcactgcactcctg |
| | | ggtgacagtgcaagactctgcgtcagacaaacaaacatcgtagcagatgtgtt |
| | | tcttaatcagagaagtgtagacaaggctaactccaggctttaatgtcctcata |
| | | tttagcaatgatacctgcaaggttgtatgagaaccaaatgaaacgccaaattt |
| | | ggaaatacatagtagatacatcatagcagagtaagccaggaatgcttctcaaa |
| | | ggtaggatatcatctgtgtcctcatatcactttatgaagtacattgtgaaagt |
| | | gaaagaacaaagaaataaatgttttttagttaatgtttaaaggatacatttat |
| | | cataattgctcttttaacactcacctccagtctcccctccgttcacacctcct |
| | | acccccattacttcctggtaacttagttaagtgtcctttgtcattcctgaggt |
| | | ttcaaggcatggtagtactgtgtcctgatattctaatcgtaaatatttaaggg |
| | | aaattcggcattttttcattttgtggttttcatattaaagtacattaaatagt |
| | | ctttttgcttttatttaggaaaaaaactgcttacctgttaattttagaaaaat |
| | | ctgattttcatttagaccttacagggtgagacacctgcatcagggtggctctt |
| | | ggtatctttcaattcaattggatcttctctgaatagtctcttgtagggagtga |
| | | ggctgctgtaccacctccctgcagtagtccatccagcttaagatgggggtcac |
| | | cagtaggccaaaagaatgggtagacctggccatgcactgccctattgtactca |
| | | aatcgtgtatcaaatggagttggatttcttctcttcatacagtacagcatttc |
| | | caagtagaaatatttctcaatgaaatgtggagagaagcacccgtttgagattc |
| | | ccgtgtgttgtgtgatttaagttagatggttttttaagaccacattcatttcc |
| | | agcattctaggtaacaatttagaaaatgtctttctcctaacctccccactttt |
| | | taaaaatcctccaactgatgaactgatgtgaaactttcttacattcactgaaa |
| | | aaaaaaaaaaataggttaagctgtttctaagcaactagatgaattaattttta |
| | | aactaagaatgtggccttattttgggaaaacaagaatatttacttgtttgtct |
| | | gctgtttaaaaaatggaagtcagcctaccaaaaaattgagactcaacttctag |
| | | gagatgggttaggatttttttttttaagtttctctagtttaattttatatata |
| | | aggggttaatgctaccttcataataactattatcatattttctcaatacatag |
| | | cttgattaaaacaactggactccccccccaccccaccccacacacacacagat |
| | | tttatatcagtctgaatctaatgcctagaataagaagtgcttcagccaggcat |
| | | agtggcactcacctgtagtctcagctactcaggaggctgaggcagcaggatca |
| | | attgagcccaggagtctgagtctagcctgggcaacatagtgagacctagaagt |
| | | tttaaattactggaaaaataatatgaaaagaataaattactggaaaaagaata |
| | | tgaaaatgttacgttctttatatccaaccgtggtaggcttttttgagttcctg |
| | | caatgctaataagaattcataaaaaggacaattcttcattttcttgggtactc |
| | | atcactaatagctgcctcgctggtaaaaaggaatacatgtatcttcaattgca |
| | | gattatttacttttaaatataaaagatataaatgtcaaatattaaatgcatct |
| | | tacatggttttcctacatagtgaaagtagaatgcttgccagttttgcctctag |
| | | gtcactcactttgaaccagccaacccaccttaattgatcatttccactaatat |
| | | gttaaattaccttaaaagaacaaaaatatttatcatgcttactataacctgtg |
| | | ttttaaaataggaggccaggcacagtggctcacacctgtaatcccaggacttt |
| | | gggaggccaaggcaggaggatcacttgagcccaggtgttcaggaccagcctgg |
| | | gcaacaaagtgagatcctatctccacaaaaaaattaaaaataaaaacttagcc |
| | | aggcgtggtggcacgtgcctgtggtcttagctacgtgggaggccaaggcggga |
| | | ggatcacctgagctcaggaggttgaggctgcagtaagccctgccaacaccact |
| | | gcacgccaacctgggcgacagagtaggacccccatctcagaatataaaataaa |
| | | gtaggaggtgcatgtgaagtagtatagatcatgacttttccaattttaagagg |
| | | ggattggcatgtactatgagcagttcacatttgtggaggaaatctacatttca |
| | | gagagtatatatttcatttggaagtctataaacatgaaaacctaaaataaata |
| | | atgtaaatctacctctagtggctctggtatttttaaacttatttatagctggc |
| | | aaagtacttttttgtatgtatttttatagcaccattgcacttctcatgtttgt |
| | | tgcaagcatctcccacagcttcctttgtcttttaattttatgacatataaata |
| | | aaagtatacatttcaatatggccatattgattgatcttttcctttgtaactct |
| | | tactactttatatttaaaaagtcatttcccagtctaaggccacctctattttc |
| | | ttttagttttttaaaatggtttcattgttttatatttgcctatgatccagaca |
| | | ttagtaactgtgggttcttaattgggcttcagagaatctgagaattccttaaa |
| | | attctctacataattgtacatgtacttaatacatgcttttttccatgttaaga |
| | | gtccagagtttttgttagatcctcaaaggggtcagtcagtctctcctcccact |
| | | tccaaaaaatgtctgagacctactactataatccatctggactttatttgggt |
| | | aaaaggtggtatggtgagactcatatttttctttttcccgcaaatagttaagt |
| | | ataccaaccatttagtaaataattacctcctgatttgtgatacctttgaaaaa |
| | | taaatgtttttctttatttttatctccacag |

TABLE 4
Exemplary target gene intron sequences

SEQ ID NO: 4
Organism: homo sapiens
Gene: OPA1
Intron: GRCh38/hg38: chr3 193626203 to 193631611
Intron Sequence:
gtgatggatggtttaagggggctaccgatacattcacactaatcagccatttctgccaagat
catgtcacctcaatctgttcatggactccaaatacaagaaattaatttgacaaagtgaaaat
ataaaagatgcatcatataaatatgtaacttttctggagtgggtagtataggtaaagccaaa
agaaacaaattcaagcagaggaattttggtttctgaaaattaggttgtctgtagggtccctg
tatttatacttagaacaaaattaggaatttctgtttatgtggtccagttattgagtcaccct
aagtttgtaggcatcttacctacctacttgctccccaagtttttatttctaaaatgaaaagc
attgctgtagatgaccagtttacactaaagaataacatttatttatttgttttagctaaagt
atatggacagggaacattcatattcttgtagaagaaaattattttgacttttgggcaaaagc
atgtagttcttatacactttgacaaactcattgcgtacatttttcacattaatcaaagtcag
cacaaataaattttcaccttggaccacggagggtttgaacactggaaatttgatataattct
ggttgctaaagaacaagttctaataaaagcttaagtgtataccaatatgtggctgttggtgc
aatcagcaggtccgtaaaaatatgattttaatggttaggtaatcccacaacggagatcccaa
agttcatgtttggaagagacttttgggtcaaagtgaaatcagtgtaatgaatttaaaattat
actctgagatcttgaaatcagctaattatgttacatcttattagctcagaaaagttttgaag
ttatatacaaatgctagtcaggaaaaaagattcagtcatgtaattcttgtacattctactat
ttaaatcaaccaatattatagattatgatttagtgcagtaattctgctggctaaccttatct
catttggtggtggttagtacttcagagtactcaccatagtttcatttatgttttcagcatca
cttcctggtttttctcaattccatggctgtggaatcaattcatatgtatatttagcttcggt
gagcaaaaacatagctagaaaaagaaaagaagtgagtttcctacctggttaaattaaagtcg
atgtgttaagccaaggaggacttcttttgaatggtactttaacaatccctgttctgtatact
gtgaatatatcatttaaatagcctaataaattggatgcttaggctgagccacctatacttta
gttttgttatggaaagaagggagaggagcaagtatgttcttatatgttacttagaaataaga
atgtagctgtagttacacattgttcttaagtttttttcgtaagacaacttgaaatgagtccc
ataggcctgctatttaacattctaagatatgacttaaggttaatgatgagcttttgaatctg
acaattcaagagatatccataatgaatactgattcattttctacattgctgaaagctaatgt
tcattttaagcctactttagtagcctttatttgggcttagagatgttattcctctttctgat
atttattgggttatctgtttaacccttttatatctccctttcccgatttgtaaattagagac
tggcaagactttttaccctgagtagagcaccaaacatggcttgtttctgcccacactgtagt
taccttgaggggaagtaaatgggactttaaaagcaatttatgctcttttatagtgaaattat
ccctcttactatcccgaaagactgttaccttacaatatcctccactcctttccccctgtagt
tactatagagatgacttttcggttcttcactgccataatgatcaaaatcctaattcatgaga
tttttatcattccaggcatgtgaggtttacttgatgcataaaaccgcaagtactttttgttg
ttttttaattgttttttctctcttatcttcttgaaagtctaagtagatcatcatttttgatg
tcttattagtagcaactaataaattttccctgtatcttctcagcaaaagaactcaagcagag
acagaagattagaactaccattggtagttttgcttcctatggatatgttcacatacatagaa
atttttacaatgacctttttatatatgtatttcagaatttcagaatggcctcaatgccttaa
taggaagaaatacttgaaatttttaaattagggcttggttttgtgaggagctagtaaaggtt
tttctctttcagctttagcttgtttctgcggaggattccgctctttctccatcagtttcata
gccctggaattgtagaaaagctctggtttcaagaccattgatatccatttctgtcagggtga
gttttaaatttatttcatgatgcaaacaatatattgaacaacaggacatgaacttgttcttg
ttgtaagtggctgaattttatcagtaaagcacatcaaaataaaatataccccaattgctagt
taagacctagagtgacagattgaaaatagcttgtgttattctcttaagaaaatatataaaaa
ttatcatctcatcaatctttaatgtttgttttataaatctaaatgtttttatattgtttcct
aggaaatattaggtctaattttttactttaccaccagctgtcttttattttactcttttttt
gagacggagtttcgctcttgttgcttaggctagagtgcagtggcactatctcagctcactgc
gacctctgcctcccgggttcaagcgattctcctgcctcagtctcccgagtagctgggattac
aggcacatgccactacaccaggctaattttgtatttttagtagagacggggtttcttcatgt
tggtcaggctggtctcgaactcccgacctcaggtgatccgcctgcctcggcctcccagagtg
ctgggattacaggcatgagccaccgcacctggccagctgtcttttaatataacattatgatt
aattgtgatgttccattaaactaagcggagaggaaacatgctggtaaaccatgtgtgagtta
ttcattgtaccagaaaggcaaatgatacattttatcctaaaattcaaatttataaacatctt
aacacttgtgatcattaaatactactaatctagcatataaattatatttgtaggcggggcac
ggtggctcacgcctgtaatcccagcactttgggaggctgaggtgggcagatcacgaggtcag
gagatcgagaccatcctggctaacatggtgaaaccccatctctactaaaaatacaaaaaaaa
ttagctgggtgtgctggcgggcacctgtagtcccagctacttgggaggctgaggcaggagaa
tggcgtgaccccaggaggcagagcttccagcctgggcgactccgtctcaaaaaaaaagaaaa
aagaaattatatttgtaatattctactaaccttatatcattttaactttttatataactttt
ttattttaccaaattaagttaaccttttatagcccttggcttatactaaacatcctaacttt
tttgtttaattgtattagtttttaagttattgccccagatgtcaagtaatgttggattttct
ataataatttaggatatattgcatgaagtcagttagtatttacatttaaaactaaaacaatt
tatactaatacagtttatacatttcatactaatttagctacagttggataaatatttaatgg
aacaaagtaaatcaaagtaccttttcaaatgaattggaaattaaatccacataacaattttt
tatgaccacactattacagtgtgatggcatgccaaatgatcataatgtggaattatgtattt
cttcattggctttcaagattctgttctttagtttgtgggctcctctccaacttgcttgtctc
ctcacagtttaggcgactgtttataattcttgtccatcctgcataaacacacacagtcaaaa
tgaaaaaaagcttctatcagcagatctgtgcttgctgtacagaaatgggaaaacaattgaag
tttgcattatcttttttctaattaccagatcgtttttggagctatttaggcatacgctttta
aggaaaaaagaaaaaaagagtgtaccttttgtttctaacaaaggttgttatctatattattg
aaataaaaaattggggatagttatgacaaagtatttagaaataggaattaaaatcttaaaat
aacttttcatagcatggacaagacttattaatgtctacctcaataagcaaatcatttaaaaa
tttttcatgtatatttgctgccatgatgtgttgtgattgcttaaataaccaatgaatgaaga
tcaacaaggatttaaatgaagaagaatatggatttaactattttctcctgtgaaataagttc
atatttacaagttttgattttcagaaattagacaattatttttaaaggctgggatgacaact
tctgcctcttaccaagaagtcaaagcacagttatgtgaattcatcataaatcacatcatttt
tattatattttgtatttataattgtattgtgactactttaaaacctgttataaaataaaatt
gttttttaatattttattttagaattattagcattaataacaatttgaagtagtttacacaa
tacctgtgagttttatttttgttttatattgaaattaattttagttgctttacttggcttca
ttgctatggatgcattctctgtgttacgagttagcagatctttccttggaactgaatttaaa
agcaagcatttggctccacttaaatctctgaaaatgcaacttgttctttgcatttattacat
aattcgctacttatggtacagaaatggatacaatacaaaaatatttccttataagatacact
gtgaccaatgagctttttaaatagctgtaatcagtaacatgtatttgacttttcaaaacaca
tttctggagggatatcagtgctttatttccccaaatatctgaatccctatgctttagtacaa
aacaacttctgaagaatttagtaaccatatgtgttgatctcttgtttttctaactagtcttt
cataagaaatgactagaatagcaacagggaaatgattgccttttaaggtttttgtttctcaa
tataaaattttggtgaaccatttttattgataaatacaggtatttttactttcttaaatcac
ttgatttaaaattactttgattaaatatgcatataaagtcagttgtttttaactctcaatac
ttatcaaaaaaatttaacttgctgtacattctgtataaacctaattctattcaactaaaatt
attttaaacatttag
SEQ ID NO: 5
Organism: homo sapiens
Gene: OPA1
Intron: GRCh38/hg38: chr3 193593374 to 193614710
Intron Sequence:
gtaagtgcaggctctaatctggccccgttaattctggggcctcttgagagtggggctgtctt
atctctatctccaaaaatgtgcaggtgactctcaggccaggccgacggcagttggagaattc
ccagatgttcttgaggacccagaatgacaggagccctggctgggcttacgttcggagccggc
ttcaatactggcccttttctctggccctacccaacccgaaaattctggacgcctctcaatct
tggcccgtctctattgtccttttgtctctgccctttacacccttgtgtcttcagtgttctgt
ctgtctctggttgcctcttttgccttttttctgtcctctccctgccaggtttggctctgtcc
atgagtcacctctctccacatttctcctaactctcggtgtcttctttttcttccatttccac
gccatgtgtacattgcatcttcaggtacctgggctcttctatcggggaaaggggcgtccgtc
tctttccctagcccgctgatagaagtcagaactagagcaatgacgcacacggtgtcagagac
ggtgattcgagatgccctttcaatagcagcttttttctgtgtttcgggagggagacttactt
tttgatgcaaggtcgtgaacgtggcaccacctttctaatctcaatcattgttgccctggggt
ggtttaattctaaatagaaaatcatagaaatcttttcatttctgtgcgttactatatgcatt
gtaatgagattaaattggattttataggaaattttgttctagtatcattagataccttcaag
cttagctcattgttgcaggcatttgataggaagtaagatgcatcaagcaaaattggaaaaac
gtggttttcctgaattaacttctaagcagttgttttgaattttttccagacctttttaagtg
gtatagataatttatcgtgtttataaggaatggaatgcattcgttagtttgtttttgttttg
ttttgagacggagtcttgctctgtcgtccaggctggagtgcagtagcgctatctcggctcac
tgcaacctccgcctcccaggttcaagcaattctcctgtctccgcctccggagtagctggaat
tacaggcacgcgccagcacgcctagctaatttttgtatttttagtagagagggggtttcacc
attttggccaggctggtctcgaactcctgacctcatgtgatccaccctcctcgacttcccaa
agtgctgggattacaaccgtgagccaccgcgcccggcccaatttgttttatataggttaact
ggagtccaaaatacagaactagatgagataacaatagttaacagtgttagtcagttagaatt
attgcataggtatttttaatctcatggaattttagtctttgagtaagttcacagcccttggt
attaaagtaagttatttacaacccttgcatttctacttctcaatatttagtgaggaaacata
tctgattttctttaaataaaaagagaaaagactgcagaagatagcattctctgttggagcaa
ttaagatgtataagaagaactacaaagacggagttttaaaacaaactgatttataagtggta
tttatttaattggctgtcattgggctaaattatttctaaagttaccatggatgccattgagt
catggcttaaaaatgtctcctggtgatggcacagtttagctacctaaagaagtagagatgtg
ggaagccagaagccccaagctctgcagtttttcttttgctatagttcctttgcatgttgtga
aagaatacagttaaattcctgctccctaacagatgagagcataagcatttctttgggcatac
atatgtaaatacatgctcatggacatgtgaaaagatcaatactaacatttgggtgcaataaa
taattgtgtaaaattatttttaaaagaattacatattaggaaatgatatattgattaaaagt
gatagtcaatgaacaagagagtagatttctgggggaaacctattttgcatcatacttgattt
ttagttttgactgaatattgaagtctatattcaaaattcttttcctttagaactgtaaaggc
attgctgcattttcttctaatgtaattgtttattgctgctgagaattcttatgacaatctga
ttttttcatcttcatgattatcttgtttttcccttcatggaatctgttagggtcttgacttt
atcctttatcctaaatttctcaaggcttggaccaggtgtgggtttggttttgttttcttttg
ctactcatttgacttggcacactcagtgggcctttccctttatctttcttcatttctgagac
gtttttctctcttattttttattatcttcctttcatttttcctgtcctttttctttctagac
atctcttaggaggatagtggtcctcttagattgatatgttatgtccgtgatttccaaagtaa
gatttgtactcgtcgtctgttaaaaggaaaagcatacatataccctatgtatatatgcacac
ttttttatttttaaattatatatgtatctgtactaattatttacattgtaagtcaaccctaa
cataatcttaaaggataagatacaaaacatactgcatctagaagcttcagtactttcttcct
gaatcccagtagatccttttgttcatcccacgggatgcattccgcccccatcctcccactcc
ctttggataccacattaccacagctctgcatcacttaactttcctcttatgtttttcacctt
ttttttttttttttttttgcattttatgtcctggggaatttccttaattcatttcatggttt
tactgttgatttttttaatattggccatcgcaacttttcttttcttttcctttcctttcctt
tcctttcctttccttttcttttcttttcttttcttttcttaattttcttttcttttcttttc
ttttctgttcttttcttttcttttcttttcttttctttcacacaggatcttggcgtgttgtc
caggctggcctcgaactcctgggctcaggtaatcctctcaccttggcctcccaaaatgccag
gattacaggcgtgcgccactgcatttggcggcaacttaatttttttatttttatttttcctt
ttagaggacacctagcactgagcattgcaacttttcatttccatgaacttttaagaaaactc
ttaaagacatgtttaattctgtacactttctattgttctttgattgctgtttttgaataaca
acaaggagtacgccttagcattttgatggtatcctcttaatagtcgcaataatagtcccctt
ggcgctctgtatactctcaagtcttaaatgttttgtatgcagctgtacgttgacagttgaat
ggtctcgctccaagtggatcagcaagaacataaagaatcatttaactggtacaggctgcggc
ttgtgaattccctattaacaccaaagaagacgtgtgagactccgtactgaaactaaagacga
cttgtgagttccacactgagatcaaataagtctttatgatggtgacagagagtggtgtcaac
gcctaaagttttggttaatctctctaaattgaggggctgaccaaaagggggaacttaactgt
attagacataattttgagaaacatgggtatgtggatggtaatggaggaaatgggtgtagatg
agattgcctagggagagtgagaagtaggttaggtctaagccttgatgagttcccaacatttc
caagggtagttgaggatactgaaaatgagtggccagtgagatagaggtaaagctagagactg
cccaggggagaggaattttcaacaatgaggaggtgtcaacattgtcaggtattgctgagagg
tcagataaaaccagaattgagcaaaatggccattggaagcctatggtgccctccgtaagagc
tgtttcgctgaagtgatagaaacggaaatcaggctgggcacagtggctcactcctgtaatcc
cagcactttgggaggccgaggtgggcggatcacctgaggttaggagttcgagaccagcctgg
ccaacatggtgaaaccctgtctctactaaaaatacaaaaagtagccaggtgtggtggcaggt
ccctgtaatcccagctactcaggaggctgaggcaggagaatcgcttgagccccagaggcgga
ggttgcagtgagcagagatcgagccactgcactccaacctgggtgacagagcaagactccgt
ttcaaaaaaaaaaaaaaaaaaagaaatggaaatcaggatggtttggcttttattttaataaa
atagctagagcagggaaatggggtactttttttcccccttttaagatgagacatagccaggt
gcagtggcttacacctgtaatcccaacactttgaaagggagggtcgcttgagctcaggagtt
tgagaccagcctaggcaacatagcaagaccttgtctctactaaaattcaaaaaaaattaact
gggcatgctggcacacacctctagtcccagctatttatgaagctgaggcaggaggatcacac
ttgagcccagatacgtggggctgcagtgagccctgataatgccattgcactccacgttgggc
aacagagcaagacttcgtctcaaaaataaataaataccctgtctcaaaaataaaaaataaat
atgggaggagagatttgacttagattcctcaaagggcaggaggaaagagaattccaaacagt
gattcacctttaatgggagaaagatcgcttaattttacatgaggaagaagaggattggtgga
gatacagtaggtgaacagtttttgtatgaggaagttgaacatgtgtcattctaatagcttcc
attctctgtgaagtagagggcaaggtcatctactgagagttggggaggtcaagagagataag
gggagattagaagagctcttctagcagagagtggaagaatgaattgctaagagagatgaagt
aggattgttaagtagttttgagggccctgttgagatgtgcttccagttgggtgtgattttct
ccagtagtgctttatttccctgggtacaggcagagagaaaaacaataaggctcatgtagggt
ttgtattttgttggacaagtcaaacagaaaagtcagaggacgagggagtttagaatgtttgc
aaaagagttattgaaacgatgaaccgcataatctaaggtggtaagtgggtgaatagataagg
aggatgtgaataggtaaggagaagaaagaaatatcagattattgattattgatggcgactct
ctaatacagctattatgccattttaaccgattaagaaactaaggctttagaaaattcataat
ttgccctaactgcacagctagtaagcagtggaaatgtgattggaaccagagttcttctgact
caatagactaaatggatgtaaggatgtagttgaaagaagggtgagctaaacgttgtggaacc
atgagctctttctctggttgatatccctctctgtaagtgataacatgggtcacgctggataa
aaccttgtggtgattggtgactttcctttgtccttcctcctgtgcctagtctggcgagtatc
tgcctttccctttcctttctcattgctgccacctaactttaggctcttccccttacatctgg
gtaactgaaataagatcacctttttgttccccttctgatttactttgacctaacattatctt
tactattttctttaaattaatgtttcattagtcttattctactcaggaactctgtagttccc
cattgcctacgaaaaaaagttaagcctcagccttatattcagtgactcttcaattggatatt
cagtccagttttactcctcctatgagccttctatgccagctccttgggtctcttgccctttc
attgtctcagctctgcacccttctttctcttttttattcttttttttttttgtacttttttg
gttttctttttggtttctttttttgttttatttattaaacctccatcacacttcatcctatg
gagttttgaaccacagcaaggtgcagtatcatcctggggctctggaggaagtggcagggagt
ccaaaatgtcaccttagcttcttatctggggccacatgtatttctgcatctgctgcttccca
cactcttgcccacaagtgtcgcttgtggaaataatttgagatttactgtctggctgacccta
gtttcaatctcttttccaccatttgctaatcattctaccttgggcaaaacatagaattaaaa
gaaaacttcagacaagttaaatttgatggagtttaattgagcaaagaaaaaaaatgatccac
aaattgggcagtctccagaatcaccgcagattcagagagactccaggggtgcctcgtggtca
gaacaaatttatagacagaaaaggtaaagtgacctacaggaatcagaattgagacatagaaa
cagtgagattggttacagctcggcgtttgccttatttgaacgcagtttgaacactcagcagt
ctatgagtggttgaagtatggccgctgggattggccaacactcagctgttattacagatgca
tactactaagttaggttttcgattttgtctgcctatttgagctaggttacagttcgtccaca
aggactcaaatataaaagtacggagtcctcttcgggccatatttagttcgctttaacaattc
ccccttttggtcagcccctcaatttagagagattgaccaaaactttaggcgttgacaccact
ctctgtcaccatcataaagacttatttggtctcagtgtggaactcacaagtcgtctttagtt
tcagtatggagtctcacacatcttctttggtgttaatagggaattcacaagttgcaactttg
taccagctaaatgattctttatgttcttgctgatccagttggagtaagaccattcaactgtc
aatgtacagctgcatacaaaacatttaagacttgagagtatacagtgcaccaaggggactat
tattatgactgttaagaggacaccgtcaaaatgctaaggtgtactccttaataaaagttctt
atgaaatgaactgaaccaaatcagccaagttaaggttcagacaatataagcagttcagcagt
attggggtctgattggtcagagtcttcagttggagtatgatagtgattaaggatcatagttc
gctgtaaagtagcttgacttaaagaggtgctcgttttcattgttaccttgttaatacaagtc
ataataacttgaaaacctgctagaagagatataaagattagaaacccttggaaaacccaagc
ttgccattcaccacttaggatgcctgcaaaccaactgttagttgctcctataaacatatcgt
gggttcctttctcttgagagatttctttattgtacttggtggcagtgtctaaggaaacagca
gtatcagccaccttttaaattaagctttttgtagtaacagaatcaggggagggattagtaca
aaattcagttttgtttaacaccaaacataggcctccagcttgagcaaaaagaagatctaaga
ctgcatgatcttccattaagtgttttcgttgaatatgtatgttgtcatgtgcctttctgaga
gtagcttctacccatctgaaaccctgggaggtctgattggctaccaaatccaagaattttcc
caatatacaaattagttttaaattccgtacaaatggtacttcactaccaccaagagtgagcc
cccaggaaccccagtggaatctttccccggtagaaactagcttatcctcgtctatttcgagg
ctagtgctaatttcagttattgatcattttggcctccaagtataagggctatcatgagaatt
ttcaggggaagcaattcgaaaggcaggagcaggccaggccagataacaagaaccaaaccaac
caaggaggcagaacagaatatgcagattctccacagacccaatagagaccctcaggggttgg
aaaagggggccacctagttgtatttgagcagggatcattcaggtttgttcgaccatgaatct
gtagctcctgaataacatccagtgggaaatttacttttctatggcccctttgtagtgtgttg
taagggtgtataaccacatctagtaaaaagagaccctactggatatacaagcaatcacttgt
actaacataagtaattcccaaatcttgagtatgtgatgcctgcaagcacaatatacgttttg
taggcatcatttggatttgttttttatatttggtgtgatcgactttatcagttgaaaaagag
tgttgtttttagtgagtgtaggaaagcaagtactagtgatgtttagagtatcaagaatagct
ttccattcttcccttggggtttcagggtgactcattgggaaacgtggaggggcactggcacc
cttggaatcatttcctgattttttggcattagcccacaaacccaacagttaccctggttttg
tgctagagcataagcttgagctgaagccatccactgattatggtcccatggattttcatgta
aggaaaaggaaaggattagggaaaaaaataaggaaaacagaaaaacacataaggctttcatg
gtggtagagaagtcttgatctgtgatctagggaaagctgtctgtaaccaggatgctgtctgc
ttctgggaagagatttccctggtcagctttaccttaaagtctccaacgggtatatagtacca
ggagtctgagggggcccttttgaattgtgagatgtggacccatggttcaaagccctgaagct
tctctgcactgtgggtggtaagaaggacttggtatggtcccatccaacgaggttcaagagtg
atcttcttctgatgtcatttccggaaggcccagtctccaaattccagaccatggagggtttg
attgtcctcagttggtggatcttgaaatgcttcctttacctggtggaagtatactttggcgt
aatacattaaagccttgcagtatttagtcatatcagagtttaagagagcaggagaagcatga
gatgctattattagggacatgggcctcccagtgactatttcataaggggtcaatttatgttt
tccaacaggattgaatctgattgccattaaaaccaaaaggtagtacctttggccaaggcaac
tcaattgattcagttaacttggacagtttcagttttcaaatgccatttgttctttcaagctt
tcctgaagactgagggtaataaggacaatggtaatgcaactgtgtcagtaacaccttattta
actgctttataacttgctcagtaaaatgagttcctctatcactggagacttttagagggatc
ccccataaaggaaaaacattttctaataatttcttagctatggtcacagcatcagctttcct
acatgggaaggcctttatccaaccagaaaacatgcaaactattacaagaacatactgatacc
ccattgagggtggtaactgaatgaagtccatctgtaaatgttcaaatggtccatcaggtggt
ggaaatatactgcctctagtttttctgggattatgagtttgacaagtcaaacattgattata
agccattttagtaatgtcagaatagtcaccccaccagtattttttcataatttggatcactt
tgtctgttccatgatgagctgtggagagctttcaataatggaagcttcaaagattcaggaag
gaccaggcggccgtccgggccctttgtgagtctttgcttcacgttaaatttacatcctttta
gataccagttttgtttttgcaaatcagatgcgttgcactgtttattaaataggtcatcgtaa
ggaaattggcttggattaatcttatggagttcattcagattgcgtatcttgatggttccagc
actagctgattgagcataaaaatctgctaaagcatttcactgatatttgggttcatttctac
aagtatgagcttcagtcttaataacagcaatctgcatttgtaacaggatagcagaaaggagc
tcatctgtttggagtccatttttgatggggatcccactagaggtgagaaaccttcgtagttt
ccatatcatgccaaaatcacgtactactccaaaagcatgtctactatccgtaaatatttact
gacttgtccttagctgtgtgacatgttcaggtaagggcagaaagttctgcaggttgggctga
cttgacttgaagagttcgcttctctattaactcattttgggtggtaacagcatatcctgact
gatatttttttttctgagtttttggcataggacccatcaacaaaaagtgttaattcaggatt
atccagtggagtatcttgtatagcaacacgaggggccactatttctgatactacactcacac
cgttgtggtcttcaccatcatcaggcagagataacagagtagcagcattaagtagattacag
ccttttagatgaagataagaaggagataggagaagtaattcataagatgttagtctactcac
tgaaaaatgctgggtttgattggaatttaatagactttccacagcgtgtgggacttgcaaat
taagttcatttcctaaaaccagatctgatgaagcttctaccagcttggctgctgctactgct
tttaaacaattaggatatgccttagagactgggcctaattgcaggctatagtatgcagtggt
cctatgtttagcaccgtgttcctgattattacattcatgaacaaacaaagtgaaaggtttag
tgtaatttggaagtcctaaagctgggggctgttgtaaggccaacttcatttggctaaaagcc
tgctcatgactgtcttcccaaggtaaaggctctggtacagcatttttagtgagctcatacag
tggtgaagctattaaggaaaaatttggaacccaggatctgcaatatcctgcaagcctaagaa
agccttttgtcttttggttgcaggtcgaggaaaactttaaataggttttatcctctcaggta
agagggaaatcccttcagcagccaagtcatgtcccaaatagtggactttttcttttgaaaat
tgaagttttggccaggcatggtggctaacgcctgtaatcccagcactttgggaggctgaggc
aggcggatcacctgaggtcgggagttcaaggacagcctgaccaacatggagaaaccctgtct
ctactaaaaatacaaaattagccaggcgtggtggtgcatgcctgtaatcccagctactcggg
aggctgaggcaggagaatcgcttgaacccaggaggcagaggttgtggtgagccagtatcaca
ccattgcactccagcctgggcaacaagagtgaaactccatctcaaaaaaaaaaaaaaagaaa
aaagaaaagaaaaaattgaagtttttccattgaagccctgtgacctttatatgcaagttgct
gtaaaaggtaaactgagtcaatttccgggcactccttaataggagagcataacaataagtta
tctacatactgaatgagagtagaattttgaggaaactgtagtgtcattaactcctgatgcag
tgcctggggaaaatatgaaggggcttcagtaaacccttgtggcattacactccaggtgtatt
gctgatttttccaagtaaaggcaaacaagtattgactttctttatggaatgctagagaaggc
tgagccaagatctattactgtggacaacttggaatcagtgggtacattaggttataaagtat
taggatttgggactacaggaaatcttggtattacaattttattaattgcctgtaaatctgga
acaaatctccagtctcatccattttgttttttaactggtaggattggagtgttacaggggct
ggtgcatggaattatgagtccttgtttaattaaatcttctacaattggtgagagcccttaaa
ttgcttcaggttttagtggatattgtggtaattaggcaaaggtttagaatgatctgttagta
cttttataggttctacacttttaattcttcctatatcagttgggaagaggcccataaacatt
aggtgttttcgaaagatcaggggtattacaggcttgagtttcgatcttatcaatttctgcct
gtagacagcataacaattctagttcaggagaatcaggaaaactcttaagattatttctgttt
ctgaggaaaattttaggtgcccttttagctttgaaagtaaatcttgccctaccaagtttact
ggaacagtatcacgtagtaaaaaactgtgtttttctgaaagggggctcagagttaattggat
gggttcagatatgggaacctctggaacttgatttgaaacccctgtcacagaaatgacctttt
tactctaagggatttgttggcttattaaggtggggtttatggtagatagagtagccctggta
tccataaggactatacacaactccctatttattttaacctctgtttccccatgttcctttaa
aggtattacggggagcaatccactggagaatcccttagagcctcctttaagttgaatattgt
caggaggactaaggtctcttgggctccctctagtggtgaaacagtttggcctagagggaggt
ttatcagccgacaatcccttttccagtgccctggttgtttgcaatacaggcagacatcttgg
ggtaaagaaattcttgttctgggacctcttgatttgatttttttaatatataattttaaaaa
tattttccaaagtgtgacttaaaaaaatttttttttattatactttaagttttagggtacat
gtgcacaacgtgcaggtttgttacatatgtatacatgtgccatgttggtgtgctgcacccat
taactcatcatttacattaggtatatctcctaatgctatccctcccccctcccccaacccca
caacaggccccagtgtgtgatgttccccttcctgtgtccaagtgttctcactgttcagttcc
cacctacgagtgagaacatgcggtgtttggttttttgtccttgtgatagtttgctgagaatg
atggtttccagcttcatccatgtccctacaaaggacattaactcatcattttttatggctcc
atagtattccatggtgtatatatgccacattttcttaatccagtctatcattgttggacatt
tgtgttggttccaagtctttgctattgtgaatagtgctgcaataaacatacgtgtgcatgtg
tctttatagcagcatgatttataatcctttgggtatatacccagtaatgggatggctgggtc
aaacggtatttctagttctagatccctgaggaattgccacactgacttccacaatggttgaa
ctagtttacagtcccaccaacagtgtaaaagtgttcctatttctccacatcctctccagcac
ctgttgtttcctgactttttaatgattgccattctaactggtgtgagttggtatctcattgt
ggttttgatttgcatttctctgatggccagtgatgatgagcattttttcatgtgtcttttgg
ctgcataaatgtcttcttttgagaagtgtctgttcatatccttcacccacttgttgatgggg
ttgtttgtttttctcttgtaagtttgtttgagttctttgtagattctggatattagcccttt
gtcagatgagaagtttcagaaattttctcccattctgtaggttgcctgttcactctgatggt
agtttcttttgctgtgcagaagctctttactttaatgagatcccatttgtcaattttggctt
ttgttgccattgcttttggtgttttagacatgaagtccttggccatgcctatgtcctgaatg
gtattgcctaggttttcttctaggatttttatggttttaggtctaaattaagtctttaatct
atcttgaattaatttttgtataaggtgtaaggaagggatccagtttcagctttctacatatg
gctagccagttttcccagcaccatttattaaatagggaatcgtttccccgtttcttgttttt
gtcaggtttgtcaaagatcagatagttgtagatatgcggcgttatttctgagggctctgttc
tgttccattggcctatatctctgttttggtaccagtaccatgctgttttggtgactgtagcc
ttgtatagtttgaagtcaggtagcgtgatgcctccagctttgttctttggcttaggattgac
ttggcaatgcaggctcttttttggttccatatgaactttaaagtagttttttccaattctgt
gaagaaagtctttggtagcttgatggggatggcattgaatctataaattaccctgggcagta
tggccattttcacgatattgattcttcctacccatgagcatggaatgttcttccatttgttt
gtatcctcttttatttccttgagcagtggtttgtagttctccttgaagaggtctttcacatc
ccttgtatgttggattcctaggtattttattctctttgaagcaattgtgaatgagagttcac
tcatgatttggctctctgtttgtctgttattggtatataagaatgctctcttttgttctttg
ttagtcttgctagcggtctatcaattttgttgatcttttcgaaaaaccagttactggattca
ttgattttttgaagggttttttgtgtctctatctccttcagttctgctctggtcttatttat
ttcttgccttctgctggcttttgaatgtgtttgctcttgcttctctagttcttttaattgtg
acgttagggtgtcaattttagatctttcctactttctcttgtgggcatttagtgctataaat
ttccctctacacactgctttgaatgtgtcccagagattctggtatgttgtgtctttgttctc
attggtttcaaagaacatctttacttctgccttcatttcgttatgtacccagtagtcattca
ggagcaggttgttcagtttccatgtagttgagcagttttgagtgagtttcttaatcctgagt
tctagtttgattccactgtggtctgagagacagtttgttataatttgtattcttttacattt
tctgaggagagctttatttccaactatgtggtcaattttggaataagtgcagtgtggtgcta
agaagaacgtatgttctgttgatttggggtggagagttctgtagatgtgtattaggtccgct
tggtgcagagctgagttgaattcctggatatccttgttaactttctgtctcgttggtctgtc
taatgttgacagtggggtgttaaagtctcccattattgttgtgtgggagtctgagtctcttt
gtaggtcactcagggcttgctttatgaatctgggtgctcctgtattggttgcatatatattt
aggatagttagctcttcttgttgaattgatccctttaccattatgtaatggccttctttgtc
tcttttgatctttgttggtttaaagtctgttttaccagagactaggattgaaacccctgcct
ttttttgttttccatttgcttggtagatcttcctccatccctttattttgagcctatgtgtg
actctgcacgtgagatgggtttcctgaatacagcacactgatgggtcttgactctttatcca
atttgccagtccgtgtcttttaattggagcatttagcccatttacatttaaggttaatattg
ttatgtgtgaatttgatcctgtcattctctcaacatttgcttgtctgtaaaggattttattt
ctccttcacttatgaagcttagtttggctggatatgaaattctgggttgaaaattcttttct
ttaagaatgttgaatattggcctccactctcttctggcgtgtagagtttctgccgagagatc
agctgttggtctgatgggcttccctttgtgggtaacctgacctttctctctagctgccatta
acattttttccttcatttcaactttggtgaatctgacaattatgtgtcttggagttgctctt
ttcgaggagtatctttgtggcattctctgtgtttcctgaatttgaatgttggcctgccttgc
tagattggggaagttctcctggataatatcctgcagagtgttttccaacttggttccattct
tcccgtcactttcaggtacaccaatcagacgtagatttggtcttttcacatagtcccatatt
tcttggaggctttgttcgtttctttttattcttttttctctaaacttctcttcccgcttcat
ttcattgatttgatcttccatcactgataccctttcttccagttgatcgaatcggctactga
ggcttgtgcatccgtcacgtagttctcgtgccttggttttcagctccatcaggtcctttaag
gacttctctgcattagttattctagttagccgttcgtcgaatttttttcaaggtttttaact
tctttgccatgggttcgaacttcctcctttagcttggatagtttgattgtctgaagtcttct
tctctcagctcgtcaaagtcattctctgtccagctttgttccgttgctggtgaggagctgca
ttcctttggaggaggagaggtgctctgatttttagaattttcagtatttttgctctgtttct
tccccatctttgtggttttgtctacctttggtctttgatgatggtgatgtacagatgggttt
ttggtgtggatgtcctttctgtttgttagttttccttctaacagtcaggaccctcagctgca
ggtctattggagtttgctggaggtccactccagaccatgtttgcctgggtatcagcagcgga
ggctgcagaacaacgaatattggtgaacagcagatgttgctgcctgatcgttcctctggaag
ttttgtctcagaggggtacccggccatgtgaggtgtcagtctgcccctactggggggtgcct
cccagttaggctattcgggggtcagggacccacttgaggaggcagtctgtctgttctcagat
ctcaagctgtgtgctgggagaaccactgctctcttccaagctgtcagacagggacatttaag
tctgcagaggtttctgctgccttttgttcggctatgccctgcctgcagaggtggagtctaca
gaggaaggcaggcctccttgagctgcagtgggctccacccagttcgagcttcccagctgctt
tttttacctgctcaagcctccgcaatggcgggcacccctcccccagcctcgctgccaccttg
cagtttgatctcagactgctgtgctagcaatgagcgaggctccatgggcataggacccgctg
agccaggcgcgggatatagtctcctggtgtgctgtttgctaagaccatcggaaaagcgcagt
attagggtgggagtgacccaattttccaggtgctgtctgtcacccctttccttggctaggaa
agggaattccctgaccccttgtgcttcctgggtgaggcgatgcctcgccctgctttggctca
tgctcggtgcgctgcacccactgtcctgcacccactgtctgacaatccccagtgagatgaac
ccagtacctcagttggaaatgcagaaatcacccgttttctgcgtcgctcaagctgggagctg
tagactggagctgttcctatttggccatcttggaaccgcccgattgtgatttaaaatgagaa
cgagatggtccctttggttcctggtccctgtaactgttgcaattgaaggggcataagcttat
tagccttttgaggttttttttgctctagagtcttctcaaaatgcttagctaggttgggcacg
atggctcacgcctgtaatcccagcactttggaaggccaaggtgggaggatcacgaggtcagg
agatcaagaccatcctggctaagatggtgaaatcccatctctactaaaaatacacagattag
ctgggcatggtggcacacgcctgtagtcgcagctactcgggaggctgaggcaagagaattgc
ttgaacctgggaggcagaggttgcagtgagccgagattgcgccactacactctagcctgggt
gacagagcaagactccacctcaaaaaaaaaaaaaaaaaaaaaaaaagttcagctaaggccac
caattcagtcacatctctaacttcccattgcaacttatgttttttagttaaactgctaagtt
caggatggagtccatttataagtaaagcagttaatgctgtttcagcccctgcagggaatact
ccttgctgtactttgagcccaggatgtttcacaaatatttctaagcgacttctgtaatctga
aactggttcatcttttcttttcttttttttttgcttacaagattgtatgatggaccaatttt
ttgtggaaaaattttaggaactgaatgttaaaaggttttcagcgatttttctagctattttt==
ggtccttcttgtgaggagctcttagagggccctttaaaatgtcctcctcaggtttgtcccat
tctgctgctgccatccatttctgagcttcaccagcccccagtatcatatgaataaattggta
aattcatgaagtcctggatcgtaagctcctattaggattctaaattcctcagtaaatttttg
agacttttcccttggaccagggaagtccttcacaatggggctaagctcagttttagaccatg
gagtgaaagtagttacagcaggcaggcctggctgatataaggtctcactttgtaagacatct
gtctaacttccttttttttttttttttttttttaaatcatcttcagggtgaaagtgtaattt
aacaaaaagtttagtggactcagagtatgtaggtagagatggacaaagaaggaacagtccga
gttagatcagtcaaagtacagtcctctttcttcatgtccttggtctgttgcttaagcttttc
atttggtttttgcaaagaatcttttaaggaggcactttttgattcacttagtcttttggagg
cctttgcgtatccatgagacaatacatcccactgtatttgtgggggctttgatccccttttt
ctaatatgccttgcaaacaattttatccaaattaaaacttctccattgtggccattttaatt
ctaagttttctttagtgaggttaacccattttactgaaaatgcacatgttctgggcccataa
tttttatacgtaaaattagctggagtccctgaagatggagtcccagactccttggattgaga
tgatcccattattaaataaggtacttatcagaggtctgaggcctctaactgaatccaatcca
gttaattatcaaatccaatttgatcttggatccagtccaggctaagtattgcttgagtaaac
tcggagagctcaaaacacaagttagtggagctcggaatctgagagaaaactcacccatgacc
tccagttacaatcaagagaccagtgagagcaacggcctcagtgggtacctcaccaggtcacc
tggtgttccagggggttgccagagtttttcttcaaatcccacttctgacaccagatctgtta
aaagaaaacttcagacaagttaaatttgatggagtttaattaagcaaggaaaataaacactt
tgcaaatcaggcagcctccagaattgaatgcagtttgaacacttagcagtctattagtgctt
gaagtatggccactgggattggccaacactcagctattattacagatgcatactactcaggt
tttccattttgtctgcctattgtgctaggttatggtttgtccacaagaacacaaatatagaa
gtatggagtccttctcaggccatatttagtttgctttaacaatacttaaaaaaaaaatttgt
aaaataaggatacttaaccttactcggtgtttctgagagttaacatttatatagttatgctg
tagtgaaaacagctagcgtaatgtctggtatgtataggaacacaagagataccgcttttccc
atatccccataccattcttcacagcattgctcctgtcttccttgattcctcctcctccttct
ttgttttttttttgtttgtttgtttgtttttttttggaggtggagtctcactctgttgccca
ggctggagtgcagtggtgtgatctcagcttactgcaacctctgcctcctgggttcaagtgat
tctcctgcctcagcctcctgaatagctgggattacaggcacacaccaacacactcagctaat
ttttgtatttttagtagggatggggtttcaccatgttggccaggctggtcttgaactcctga
cctcaggtgattcacccacctcagcctcccaaagtgctgggattacaggtgtgagccaccac
accctgcctccttcttaagaagtttccagtcccttgtaattaaaggaattaatattttttaa
ctacttagaatcagactggccctgattattagtaagcaactaatagtaagcaagcaactatg
tatgcaactatgagtgtatgttaagatatggttgttggtaacctttcattctcttcaggaag
aagaagagggtggagctctacagtcaatgtgtacatttaaattctgttccctttcgagcttt
tttgctactttcattcttctggggatccaggtgcttgagttgggattgattaacttccttaa
tttccacccctgtgctgtcaggatcgggagacatagatgaaggtgttctaaactgctagaaa
ttttgtttttgaaagcaaaagtttgcatgcatttttgttttcaacttttacttacagtgaat
agtagttaataaaataagtccctgccttttctctctttggtttcaattcctgagaccaggat
catagcccacatattagagtggagtcccactgctttggtttgaatcatgcctttgtttctta
tgtcagtgtgactttgggcaagttatttaagtctttgcaccacattttcctcatctgtaaaa
tgaggataatactagtactttctacatgggattgttagcaggattaaatgagatagcacata
ctgtaaccatgtctggcacatagtcaatggttagtaaatgtgaactattgtgtgacattgtg
gttagtcacgtatggggctgtgtttcctttagtatattgctcttttaatgtcatttcctttg
tactgttaccctctctgatctttcttccatattca
SEQ ID NO: 276
Organism: homo sapiens
Gene: OPA1
Intron: GRCh38/hg38:chr3 193618937 to 193626091
Intron Sequence:
gtaagtgtaaaagagaattgttcatgtaggtagtcttgaaagattttttaaagtttttactt
ctttggaagattttaaaatgataacatctgagaagcaaatacaaaaacatccaagtagagat
atcgttactaatcttagtgcaaagtacaaggtattacgtggcagttctggaaatataattga
gaagcccatttctttcacatatgtccagtgaagcattagtttcgagggttgtccccaagaaa
gagttgtgttgttaagtgtgtggggggagaaaggctcgtttagacaaggcaagcggacttct
tttctttccctaggacctctcatactgtaatatactcatgcgcattgtgaatttccaaggag
tcaaagcatacagtgttttcccaaattatttatcaacagaacccttttgctcatggaacgtc
gtatagggactagatttcactttggggaaactagaaagggaataggaattgggttattagga
aataaatcaattccctgatattgatagttaacaaagttatgtatggggttatttatggtatg
ttattttcaacacatattcattaacaaaatccatatgaaagttataggagaattgctgaggt
agaataacatactttgtttgtatttataatactcatatatttacctgacgttttctgagtct
tcacttttttcattcttttggaattggtaaaataactgattccttgaaagtttttttctaaa
taatacctagataatagatttatagaaaaaatattgtatgaatgttttaacattcatgtaat
atggaacatgtaatttttatactggaggttattatagttttaatacatcaaagaaataatgt
ttattttggaagcagaaagaagaaataatttctatgaataggttttcatctctttccttgtt
cttcaactttgaactttttatattccaaattttaattatatttcaaaagatttttttctttt
gccttttaattttatcttttggagaaaaatgtatgtcaaaatgtatgtacgtgtatttgtct
tttgatttgatcttttttgaccctcttttgcattgacattattttaaccaaaggacactctt
gattgttcatgctactgggggaaaaaaaaataagtagaaattagcctaatagttgtggctta
ttttgagtgaaggccttagcccttaaggcaattaaatttactgtggagagaagagctaatct
aatggggagaaggagcctttgttacaggtgtggtagtgtggttctttgagtgacaagatttc
tgtttgccagattggttaggagaagtctgtgtgtctgctttctctcttatggcctaggatca
ctgtggtgaatgaaaaacctgtctcagggcctgactcagataattcccttaaaacccggcta
aggtcatagatgaataatcagtaattgaacagaagctctgcaatagaaaagaagccagataa
ttatttttggaaatttaattatatttacagattttattttatacagtagacatggaattaaa
tttattacattatgttctaatttactctttgcttgttttgatttgcttgtttgacaatacat
gtccttgtaaactatttccttttaactttttctcaatttatggtgcttattttccccattaa
agacttaccaattttttttttaactatttgttacacatactgaatctagagttgtaattaag
ctactttcattactggttaagtcaaattatagcaaatgctactataaaaatttactatccaa
aaatgtgtctcaagccccaactgatggtttcaaattctgttattaataatatgcagcattgt
gtttgcaaagcttggctgttacttgtgatgcttgagaatgatgagtcactcagctaaactga
gtgattttgagacttgtgtacaaattgatggttgaatgtaagcatgcaaagagagaccttag
cttagcagtaccctttttgaaatcactctgacatcaagtttgaaaatgtgggcaataatcag
aggtggtaaggtggccaggctttagctgaatacttttttaactggttcagtctgagggctga
aagccccagatttaaacagtatttagaatttgaagcagtcaagtattagtttaatggttgtc
aggtttgtaacaaagtttctggctagacttctactagaaatgtaaaagtgcatgtgaatcag
ctttttaaaaaagtaataataattgaaaaacatttctacaactagaactaaagaaaagattt
gtcctttctaataggaaaacacatctggagaagtgctggcaactagcagaacagttaggacc
attcagaatcaactgaagtgaaagtgacggggagctgaggggaacacagatagtttgacttc
agtcagacagaataaacatgatgaaccgataacctgtgattcccagcctggggttactactg
gagttttaggtgtcctggaaagttataataccggtcttcaaaaagtctacagaaagcataga
tttccacataatgctgcacaggctaacgaattaatcaagtttctttggtttggcctggattt
atatccattcagtttgtggacactactgaattatttatgtcatgttgatcaaaagttctgat
atgatttgattaatgaaacattgaaaaaaatagtaaaaccaaccatttttaaccttacacta
ctatcttgaggtatgattgacatacattaaaaccacctcttaataaatgcttcttgttaatc
aaaaatttgaaaacgtatgtccactggaggaaaaaagacatagccctggatgtgaactgaat
attactgagactcggagaccttcagaactacctgaagatgaatcgaagtgctgcctacttta
gagaattggactaatttaatttgggagtcagcagattgctgtatatcagtcatcatatatac
cggtgacaagaccacttagttcattcccttttttagattctgtaagattattgtgttccagt
gaaattgatttgcaaaatgagacattttattttctgtgcttttgttctatcatgtttctgat
tggtcataagcatctcacagaagtaagaaatatggcgattcagaaggcaacaagcacattta
taatttatagaaaatatttgaaggactttttcatggcccaaatcatgaaaagtagtagtatt
gttttaagtataattattaaattataatacattaatgttctttcttgcaacatattactctc
attctttttttttttttttttttttgagacggagtctcactctgtcacccggctggagtaca
gtggtacgatcttggcccactgcaacctctgcctcccgggttcaagcgattctcctgcctca
gcctcccaagtagctgggattacaggctcctgccaccacgcctagctaatttttgtattttt
agtagagacagggtttcaccaggttggccaggatggtcttgatctcttgacctcatggtccg
tccacctctgcctcccaaagtgttgggattacaggcgtgagccacccagcagtctgattctt
aattttatagtttatgttgtacctccccagctgaagtatctcttttcttttttcccgcgtgt
ttagtgttcactcatctttatagcatagctcaattgtcacttcatgaagccttccataacct
ttgtagctccattaattatattcttctgagtgtttaaaacacttgccatatgaaacactatt
tactttggcttacattcttactatctaatcggccatttctgttactaaatctttttctcaga
gcacctgggatagtcttgtgtcttagtaaaatcagttgattgatttaactcggtagagtaga
ggctgattaaagtaaataaatctggttgatgccaacaaaattttggtcccctcaattttttg
ctctcattacctgcaaattctccctggccttcatatttggcaaccattgaggagaacaaggc
tgtaaaagtagttcatgtacttgatattctgaattggaattaagcagagttgcttaagtagg
acttgcttttctgggatttcttatgcaacaaataatgtagtaactggaaatccaagttcaag
acactggcagattcgatgtcttttgaggacccttggcttcatagatgatgccttctccctat
atccttacatagcaaaaggggccaggcagctctggcctttttttgtaaggccaataactcca
gaaacctcatgacctcatcacctcccaaaggccccacctctcaatactatcacattgtgagg
ctaggtttcaacatatgaattgtgggagacaaaaattcagaccatagtataatatttcaaga
ttacttaaactcttctctaccaaactcattaacttttaggttagcacagtattttcattgat
attttggtttctggagttattactaattttcttgatctgatgttataattaaaaaaaaacag
gactttgtacgtgaaatgagactgagataaggaagctgattcagagatggagatttaaaaaa
agagagatgagagattgagatctgcagtgtcaaactgacaatagccaggagtcaggagatat
taagagactatatcatctgtgattgttaatgattatttattgttatttataaatactactgt
attttatatattatatacattgttttaaaaattatttttgtaccatttcttgaaagaaaaat
gtctaagcttgggaaaatatttattgaaaaatgtggtttgtacatctgaggagtgtatcttg
cacagtaggtgcatagatttcttcctcttcctgttccacatggccttagcttagaggctgtg
tggccatcacttggtatttagggtaagactggtgcacaaaatcaaagacaggtaaccttggt
ataagtgtagtatcatgtaaatagcttttctatgtctaattcttgttttcttcctacttttt
caggaggtcaatttcagttcatttcaactatctttacataatagtgctttagtaacaggcat
ggaaggaaagagacatgtccctagagtgttttcttgaaatctaatagatgattggagtattt
accatgcagttgtgtatatacataagcagtgaattcgagaggaatttttaagctgtaaaaaa
aagcattgtgtgccttatagacgcgagtgagaaatgtggaatatggctgatccaaagggaat
gagttatctcaattgattaatcacagtcagttacagattgaactctttgttctactctttgc
ccccttctcactattgctcttgactagtcttaagaaagaaatgtggaatattttctcacggc
tttgggattttataaattagaatactagtggtatgtaaatacagcaggtacactactgtata
aaccaacataggaagccttctttaaagggaattgtttgagaaatttgaacacttggataatt
tgaataaaggattgtgataaatgatcaaatgaaagaaaataaatcaggttactcttctttct
gcttgataaagcaataattttttttaaaggtaaaaattatgagaatgatgaggatagtagtt
agcattgtctttctttgataggtttgttaatgatcataaaactgatttatttaaagacatgt
ctttttataactattttatactgttgtatctggaaacaaatattgaatttcatttgtcatgt
ggaagaaatcaactagttttaacctttgatttataataaatcaaccactttcatttattgtc
taatactggcaatgaacacagcctaatgtatcaaaactaacagaataaaaattctccaagtt
atatccagactttaagacactttctaattatataaaataaaatattttgggcagtcattttt
taactctgaaactatttaaaactcctaatttagaatatcttaataaatacccattttcctct
ttttatttttataacttggtaaaaattgagtccattgttttcccagaacgctgttcttaaac
aaatggttacctccttcattagaactttactttttttaggatttctaattaagaaaacatta
ggcttgtaacattgtcaaatcttggtggtctttcttccacgttttttgaggtcgattatcta
agaggccatcagttaataaagctatgcaggaaatgacatcatgccacatgtgaatatcctgt
attaaaaattgtatcaatatactattttataattatgaagtggaatgaattttagaaataga
aaaggtgattttttgtgcataggtccaaactgtgttttgttttcatttcagaatttcataat
aactatattgtctccatatcttaattgtgtttttttatagcacttttgtttagtaatttgta
tatgcttggctgtattctcagaggctgtttctatttaatgttgtcaaaacagctcataaaaa
gtgaaaattcggtcagactagttatttgatattatatatgaaatcaaaacaacctgaaacat
tatcttttaatttaaataaagaaccccaaattttaatcaaatgtatgcaaaggcacatagaa
tatatgacttaatgtacaacctttattaacttgatgatggaaacctgttcctagggaccttt
acttgaataaatgaaatatcaagaaaaaatactaacttaagaataataatttaataagtaag
taagctattatgatcttcaatcagtcctgagagaatcatggttgagaattagaaaatttaga
ccagtaagatcaacactgttaaaaaaaaaaaaaaatcagtattttttctccatattttttat
atatctggatcattttatttagcacttattattgcactttccttttcactttttaaactatg
ctgttttatttttctgagacatctgatttactgaggaggaaaatggaaatgcggtacagagc
ccaagggtatgacggctttaaatgagtttccatttctgttttaagttaaccatccctcccta
gcttacatctgttcctttgttgcacccttggtttaacattattctcctccccaatttcctct
tctcctcattgtgaactcgtggcag
SEQ ID NO: 277
Organism: homo sapiens
Gene: OPA1
Exon: GRCh38/hg38:chr3 193626092 to 193626202
Exon Sequence:
GGTCTGCTTGGTGAGCTCATTCTCTTACAACAACAAATTCAAGAGCATGAAGAGGAAGCGCG
CAGAGCCGCTGGCCAATATAGCACGAGCTATGCCCAACAGAAGCGCAAG
SEQ ID NO: 278
Organism: homo sapiens
Gene: OPA1
Intron: GRCh38/hg38:chr3 193626203 to 193631611
Intron Sequence:
gtgatggatggtttaagggggctaccgatacattcacactaatcagccatttctgccaagat
catgtcacctcaatctgttcatggactccaaatacaagaaattaatttgacaaagtgaaaat
ataaaagatgcatcatataaatatgtaacttttctggagtgggtagtataggtaaagccaaa
agaaacaaattcaagcagaggaattttggtttctgaaaattaggttgtctgtagggtccctg
tatttatacttagaacaaaattaggaatttctgtttatgtggtccagttattgagtcaccct
aagtttgtaggcatcttacctacctacttgctccccaagtttttatttctaaaatgaaaagc
attgctgtagatgaccagtttacactaaagaataacatttatttatttgttttagctaaagt
atatggacagggaacattcatattcttgtagaagaaaattattttgacttttgggcaaaagc
atgtagttcttatacactttgacaaactcattgcgtacatttttcacattaatcaaagtcag
cacaaataaattttcaccttggaccacggagggtttgaacactggaaatttgatataattct
ggttgctaaagaacaagttctaataaaagcttaagtgtataccaatatgtggctgttggtgc
aatcagcaggtccgtaaaaatatgattttaatggttaggtaatcccacaacggagatcccaa
agttcatgtttggaagagacttttgggtcaaagtgaaatcagtgtaatgaatttaaaattat
actctgagatcttgaaatcagctaattatgttacatcttattagctcagaaaagttttgaag
ttatatacaaatgctagtcaggaaaaaagattcagtcatgtaattcttgtacattctactat
ttaaatcaaccaatattatagattatgatttagtgcagtaattctgctggctaaccttatct
catttggtggtggttagtacttcagagtactcaccatagtttcatttatgttttcagcatca
cttcctggtttttctcaattccatggctgtggaatcaattcatatgtatatttagcttcggt
gagcaaaaacatagctagaaaaagaaaagaagtgagtttcctacctggttaaattaaagtcg
atgtgttaagccaaggaggacttcttttgaatggtactttaacaatccctgttctgtatact
gtgaatatatcatttaaatagcctaataaattggatgcttaggctgagccacctatacttta
gttttgttatggaaagaagggagaggagcaagtatgttcttatatgttacttagaaataaga
atgtagctgtagttacacattgttcttaagtttttttcgtaagacaacttgaaatgagtccc
ataggcctgctatttaacattctaagatatgacttaaggttaatgatgagcttttgaatctg
acaattcaagagatatccataatgaatactgattcattttctacattgctgaaagctaatgt
tcattttaagcctactttagtagcctttatttgggcttagagatgttattcctctttctgat
atttattgggttatctgtttaacccttttatatctccctttcccgatttgtaaattagagac
tggcaagactttttaccctgagtagagcaccaaacatggcttgtttctgcccacactgtagt
taccttgaggggaagtaaatgggactttaaaagcaatttatgctcttttatagtgaaattat
ccctcttactatcccgaaagactgttaccttacaatatcctccactcctttccccctgtagt
tactatagagatgacttttcggttcttcactgccataatgatcaaaatcctaattcatgaga
tttttatcattccaggcatgtgaggtttacttgatgcataaaaccgcaagtactttttgttg
ttttttaattgttttttctctcttatcttcttgaaagtctaagtagatcatcatttttgatg
tcttattagtagcaactaataaattttccctgtatcttctcagcaaaagaactcaagcagag
acagaagattagaactaccattggtagttttgcttcctatggatatgttcacatacatagaa
atttttacaatgacctttttatatatgtatttcagaatttcagaatggcctcaatgccttaa
taggaagaaatacttgaaatttttaaattagggcttggttttgtgaggagctagtaaaggtt
tttctctttcagctttagcttgtttctgcggaggattccgctctttctccatcagtttcata
gccctggaattgtagaaaagctctggtttcaagaccattgatatccatttctgtcagggtga
gttttaaatttatttcatgatgcaaacaatatattgaacaacaggacatgaacttgttcttg
ttgtaagtggctgaattttatcagtaaagcacatcaaaataaaatataccccaattgctagt
taagacctagagtgacagattgaaaatagcttgtgttattctcttaagaaaatatataaaaa
ttatcatctcatcaatctttaatgtttgttttataaatctaaatgtttttatattgtttcct
aggaaatattaggtctaattttttactttaccaccagctgtcttttattttactcttttttt
gagacggagtttcgctcttgttgcttaggctagagtgcagtggcactatctcagctcactgc
gacctctgcctcccgggttcaagcgattctcctgcctcagtctcccgagtagctgggattac
aggcacatgccactacaccaggctaattttgtatttttagtagagacggggtttcttcatgt
tggtcaggctggtctcgaactcccgacctcaggtgatccgcctgcctcggcctcccagagtg
ctgggattacaggcatgagccaccgcacctggccagctgtcttttaatataacattatgatt
aattgtgatgttccattaaactaagcggagaggaaacatgctggtaaaccatgtgtgagtta
ttcattgtaccagaaaggcaaatgatacattttatcctaaaattcaaatttataaacatctt
aacacttgtgatcattaaatactactaatctagcatataaattatatttgtaggcggggcac
ggtggctcacgcctgtaatcccagcactttgggaggctgaggtgggcagatcacgaggtcag
gagatcgagaccatcctggctaacatggtgaaaccccatctctactaaaaatacaaaaaaaa
ttagctgggtgtgctggcgggcacctgtagtcccagctacttgggaggctgaggcaggagaa
tggcgtgaccccaggaggcagagcttccagcctgggcgactccgtctcaaaaaaaaagaaaa
aagaaattatatttgtaatattctactaaccttatatcattttaactttttatataactttt
ttattttaccaaattaagttaaccttttatagcccttggcttatactaaacatcctaacttt
tttgtttaattgtattagtttttaagttattgccccagatgtcaagtaatgttggattttct
ataataatttaggatatattgcatgaagtcagttagtatttacatttaaaactaaaacaatt
tatactaatacagtttatacatttcatactaatttagctacagttggataaatatttaatgg
aacaaagtaaatcaaagtaccttttcaaatgaattggaaattaaatccacataacaattttt
tatgaccacactattacagtgtgatggcatgccaaatgatcataatgtggaattatgtattt
cttcattggctttcaagattctgttctttagtttgtgggctcctctccaacttgcttgtctc
ctcacagtttaggcgactgtttataattcttgtccatcctgcataaacacacacagtcaaaa
tgaaaaaaagcttctatcagcagatctgtgcttgctgtacagaaatgggaaaacaattgaag
tttgcattatcttttttctaattaccagatcgtttttggagctatttaggcatacgctttta
aggaaaaaagaaaaaaagagtgtaccttttgtttctaacaaaggttgttatctatattattg
aaataaaaaattggggatagttatgacaaagtatttagaaataggaattaaaatcttaaaat
aacttttcatagcatggacaagacttattaatgtctacctcaataagcaaatcatttaaaaa
tttttcatgtatatttgctgccatgatgtgttgtgattgcttaaataaccaatgaatgaaga
tcaacaaggatttaaatgaagaagaatatggatttaactattttctcctgtgaaataagttc
atatttacaagttttgattttcagaaattagacaattatttttaaaggctgggatgacaact
tctgcctcttaccaagaagtcaaagcacagttatgtgaattcatcataaatcacatcatttt
tattatattttgtatttataattgtattgtgactactttaaaacctgttataaaataaaatt
gttttttaatattttattttagaattattagcattaataacaatttgaagtagtttacacaa
tacctgtgagttttatttttgttttatattgaaattaattttagttgctttacttggcttca
ttgctatggatgcattctctgtgttacgagttagcagatctttccttggaactgaatttaaa
agcaagcatttggctccacttaaatctctgaaaatgcaacttgttctttgcatttattacat
aattcgctacttatggtacagaaatggatacaatacaaaaatatttccttataagatacact
gtgaccaatgagctttttaaatagctgtaatcagtaacatgtatttgacttttcaaaacaca
tttctggagggatatcagtgctttatttccccaaatatctgaatccctatgctttagtacaa
aacaacttctgaagaatttagtaaccatatgtgttgatctcttgtttttctaactagtcttt
cataagaaatgactagaatagcaacagggaaatgattgccttttaaggtttttgtttctcaa
tataaaattttggtgaaccatttttattgataaatacaggtatttttactttcttaaatcac
ttgatttaaaattactttgattaaatatgcatataaagtcagttgtttttaactctcaatac
ttatcaaaaaaatttaacttgctgtacattctgtataaacctaattctattcaactaaaatt
attttaaacatttag
SEQ ID NO: 279
Organism: homo sapiens
Gene: OPA1
NMD Exon: GRCh38/hg38:chr3 193628509 to 193628616
NMD Exon Sequence:
CTTTAGCTTGTTTCTGCGGAGGATTCCGCTCTTTCTCCATCAGTTTCATAGCCCTGGAATTG
TAGAAAAGCTCTGGTTTCAAGACCATTGATATCCATTTCTGTCAGG

### Example 2.2: Confirmation of NMD Exon Via Cycloheximide Treatment

[0701] RT-PCR analysis using cytoplasmic RNA from DMSO-treated or puromycin or cycloheximide-treated human cells and primers in exons was used to confirm the presence of a band corresponding to an NMD-inducing exon. The identity of the product was confirmed by sequencing. Densitometry analysis of the bands was performed to calculate percent NMD exon inclusion of total transcript. Treatment of cells with cycloheximide or puromycin to inhibit NMD can lead to an increase of the product corresponding to the NMD-inducing exon in the cytoplasmic fraction. FIG. 14 depicts confirmation of exemplary NMD exons in OPA1 gene transcripts using cycloheximide or puromycin treatment, respectively.

### Example 2.3: NMD Exon Region ASO Walk

[0702] An ASO walk was performed for NMD exon region targeting sequences immediately upstream of the 3′ splice site, across the 3′splice site, the NMD exon, across the 5′ splice site, and downstream of the 5′ splice site using 2′-MOE ASOs, PS backbone. ASOs were designed to cover these regions by shifting 5 nucleotides at a time. FIG. 15 depicts an ASO walk for an exemplary OPA1 NMD exon region.

### Example 2.4: NMD Exon Region ASO Walk Evaluated by RT-PCR

[0703] ASO walk sequences were evaluated by RT-PCR. HEK293 cells were transfected using Lipofectamine RNAiMax with control ASO treated (Ctrl), or with a 2′-MOE ASO targeting the OPA1 NMD exon regions as described herein. Products corresponding to OPA1 mRNA were quantified and normalized to RPL32 internal control, and fold-change relative to control was plotted. FIG. 16 depicts evaluation via TaqMan qPCR of various exemplary ASO walk along exemplary NMD exon regions. The measurement of the amount of OPA1 mRNA was carried out with HEK293 cells 24 hours after treatment with 80 nM of an exemplary ASO in the absence of cycloheximide, by TaqMan qPCR using probes spanning exon 7 and exon 8.

### Example 2.5: NMD Exon Region ASO Microwalk Evaluated by RT-qPCR

[0704] ASO microwalk sequences (across exon 7x) were evaluated by RT-PCR. HEK293 cells were transfected using Lipofectamine RNAiMax with control ASO treated (Ctrl), or with a 2′-MOE ASO targeting the OPA1 NMD exon regions as described herein. Products corresponding to NMD exon inclusion and full-length were quantified and percent NMD exon inclusion was plotted. FIG. 17 depicts evaluation of various exemplary ASO walk along exemplary NMD exon regions. The measurement of the amount of OPA1 mRNA was carried out with HEK293 cells 24 hours after transfection with 80 nM of an exemplary ASO in the absence of cycloheximide, by TaqMan qPCR using probes spanning exon 7 and exon 8 (top panel of FIG. 17). qPCR amplification results were normalized to RPL32 and plotted as fold change relative to control. The measurement of exon 7x inclusion was carried out by quantifying exon 7x inclusion based on RT-PCR using probes spanning exon 7 and exon 8 (bottom panel of FIG. 17).

### Example 2.6: Dose-Dependent Effect of Selected ASO in CHX-Treated Cells

[0705] PAGE can be used to show SYBR-safe-stained RT-PCR products of mock-treated (Sham, RNAiMAX alone), or treated with 2′-MOE ASOs targeting NMD exons at 30 nM, 80 nM, and 200 nM concentrations in mouse or human cells by RNAiMAX transfection. Products corresponding to NMD exon inclusion and full-length are quantified and percent NMD exon inclusion can be plotted. The full-length products can also be normalized to HPRT internal control and fold-change relative to Sham can be plotted.

### Example 2.7: Intravitreal (IVT) Injection of Selected ASOs

[0706] PAGEs of SYBR-safe-stained RT-PCR products of mice from PBS-injected (1 μL) (−) or ASOs or Cep290 (negative control ASO; Gerard et al, Mol. Ther. Nuc. Ac., 2015) 2′-MOE ASO-injected (1 μL) (+) at 10 mM concentration. Products corresponding to NMD exon inclusion and full-length (are quantified and percent NMD exon inclusion can be plotted Full-length products can be normalized to GAPDH internal control and fold-change of ASO-injected relative to PBS-injected can plotted.

### Example 2.8: Intracerebroventricular (ICV) Injection of Selected ASOs

[0707] PAGEs of SYBR-safe-stained RT-PCR products of mice from un-injected (−, no ASO control), or 300 μg of Cep290 (negative control ASO; Gerard et al, Mol. Ther. Nuc. Ac., 2015), 2′-MOE ASO-injected brains. Products corresponding to NMD exon inclusion and full-length can be quantified and percent NMD exon inclusion can be plotted. TaqMan PCR can be performed using two different probes spanning NMD exon junctions and the products can be normalized to GAPDH internal control and fold-change of ASO-injected relative to Cep290-injected brains can be plotted.

### Example 2.9: OPA1 Non-Productive Splicing Event Identification and Validation

[0708] A novel nonsense-mediated decay (NMD) exon inclusion event (Exon X) was identified in the OPA1 gene which leads to the introduction of a premature termination codon (PTC) resulting in a non-productive mRNA transcript degraded by NMD, as diagramed in FIG. 11C. As NMD is a translation-dependent process, the protein synthesis inhibitor cycloheximide (CHX) was used to evaluate the true abundance of the event. FIG. 18 shows an increase in OPA1 transcripts containing the NMD exon in HEK293 cells with increasing CHX dose. Other ocular cell lines also validated for the presence of the NMD exon (ARPE-19, Y79).

### Example 2.10: OPA1 NMD Event is Conserved in Primate Eyes

[0709] FIG. 19A shows reverse transcription PCR data from the posterior segment of the eye of Chlorocebus sabaeus (green monkey) at postnatal data P93 (3 months) and postnatal day P942 (2.6 years) for the right eye (OD) and left eye (OS). FIG. 19B shows quantification of the NMD exon abundance at 3 months and 2.6 years of age (N=1/age). Data represents average of right eye and left eye values for each animal. The abundance of the event may be higher in vivo, given that NMD is presumed active in the tissue.

### Example 2.11: OPA1 Antisense Oligonucleotides Reduce Non-Productive Splicing and Increase Productive OPA1 mRNA Levels In Vitro

[0710] Exemplary antisense oligomers (ASOs) were transfected at 80 nM dose into HEK293 cells using Lipofectamine RNAiMax as a transfection agent. To assess the effect on the NMD exon, cells were treated with CHX (50 μg/ml, 3 hours) 21 hours after transfection. RNA was isolated for RT-PCR using probes spanning exon 7 and exon 8, as shown in FIG. 20A, and quantified in FIG. 20B. To assess levels of productive OPA1 mRNA expression, non-cycloheximide treated cells were used for TaqMan qPCR using probes spanning exon 23 and exon 24, and mRNA expression of OPA1 was normalized to RPL32, as shown in FIG. 21. Arrows highlight ASOs that reduce non-productive splicing and increase OPA1 mRNA expression by at least 20%. Among these, ASO-14 produces the most increase in OPA1 mRNA (30%).

### Example 2.12: ASO-14 Decreases Non-Productive OPA1 mRNA and Increases OPA1 Expression in a Dose-Dependent Manner In Vitro

[0711] HEK293 cells were transfected with different doses of ASO-14 or non-targeting (NT) ASO. RNA was isolated 24 hours after transfection and analyzed for impact on non-productive OPA1 mRNA (FIG. 22A) and OPA1 mRNA expression (FIG. 22B) similarly to in Example 11. For protein analysis, cells were lysed with RIPA buffer 48 hours after transfection and western blots were probed with antibodies targeting OPA1 and β-actin, as shown in FIG. 22C. Multiple bands correspond to different isoforms of OPA1. Data represent the average of three independent experiments (* P<0.05 by one-way ANOVA compared to “NO ASO” group). The non-targeting ASO targets an unrelated gene.

### Example 2.13: ASO-14 Increases OPA1 Expression in an OPA1 Haploinsufficient (OPA1+/−) Cell Line

[0712] OPA1 haploinsufficient (OPA1+/−) HEK293 cells were generated using CRISPR-Cas9 gene editing. Similar to ADOA patient cells, OPA1+/−HEK293 cells show approximately 50% mRNA and protein levels of that observed in OPA1+/+ cells (FIG. 23A). The OPA1+/−HEK293 cells were transfected with different doses of ASO-14 as indicated in FIG. 23B, and total protein was isolated 72 hours after transfection. Western blots were probed with antibodies targeting OPA1 and β-tubulin, a representative blot is shown in FIG. 23B and quantification of two independent experiments is shown in FIG. 23C (* P<0.05 by one-way ANOVA compared to “No ASO” group). ASO-14 increases OPA1 protein levels in OPA1+/−HEK293 cells by 50%, which translates to 75% of wild-type levels.

### Example 2.14: Exemplary OPA1 ASOs Decrease Non-Productive Splicing and Increase OPA1 Expression in Wild-Type Rabbit Retinae Following Intravitreal Injection

[0713] Female New Zealand White (NZW) adult rabbits were injected with either vehicle, non-targeting (NT), or test, antisense oligonucleotides. Animals were euthanized after 15 days to obtain retinal tissue. FIG. 24A outlines the study design, (*Final concentration in the vitreous was calculated assuming vitreal volume in the rabbit as 1.5 mL). FIG. 24B shows levels of productive and non-productive OPA1 mRNA and protein, and FIG. 24C shows quantification of this data (* P<0.05 by one-way ANOVA compared to Vehicle group). OD: oculus dexter (right eye), OS: oculus sinister (left eye).

[0714] It was also found that the antisense oligonucleotides were well-tolerated in wild-type rabbit for up to 28 days after intravitreal injection.

### Example 2.15: ASO-14 Modulates Inclusion of Both Exon 7 and Exon 7x in OPA1 mRNA Transcript

[0715] HEK293 cells were transfected with different doses of ASO-14 or no ASO, in the presence or absence of cycloheximide. RNA was isolated 24 hours after transfection and analyzed for impact on OPA1 mRNA splicing and OPA1 mRNA expression similarly to in Example 11. FIG. 26A shows a gel image of PCR products from RT-PCR reaction using probes spanning exon 7 and 8. As shown in the figure, the dose of ASO-14 increased from 1 nM, 5 nM, to 20 nM, the amount of transcripts having exon 7x between exons 7 and 8 (“7+7x+8”) gradually decreased, as compared to relatively stable amount of transcripts lacking exon 7x between exons 7 and 8 (“7+8”). FIG. 26B shows plots summarizing the relative amount of various OPA1 mRNA transcripts quantified by qPCR reactions using different pairs of probes: “Ex6-8,” probes spanning exons 6 and 8; “Ex7-8,” probes spanning exons 7 and 8; and “Ex23-24,” probes spanning exons 23 and 24. Results were normalized to RPL32 as an internal control. FIG. 26C shows a chart summarizing the quantification of various OPA1 mRNA transcripts based on sequencing of the RNA extracts from the treated HEK293 cells in the absence of cycloheximide. As suggested by the figures, ASO-14 appeared to induce reduction in OPA1 exon 7x inclusion, increase in OPA1 Ex6-8 transcripts (transcripts having exon 6 and exon 8 in tandem, thus lacking exon 7 and exon 7x), a modest decrease or no change in OPA1 Ex7-8 transcripts (transcripts having exon 7 and exon 8 in tandem, thus lacking exon 7x).

### Example 2.16: Exemplary OPA1 Antisense Oligomers Modulate Inclusion of Exon 7, Exon 7x, or Both in OPA1 mRNA Transcript

[0716] HEK293 cells were transfected with different exemplary OPA1 modified 2′MOE-PS (2′ methoxyethyl and phosphorothioate) ASOs. Each well of HEK 293 cells (about 100,000 cells/well) were treated with an exemplary ASO at 80 nM final concentration in the presence of 0.9 μL of Lipofectamine® RNAiMax in the absence of cycloheximide. The cells were harvested 24 hours after transfection and RNA was isolated and analyzed for impact on OPA1 mRNA splicing and OPA1 mRNA expression similarly to in Example 11. FIG. 27A shows a gel image of PCR products from RT-PCR reaction using probes spanning exon 6 and 8, and FIG. 27B is a plot summarizing the relative ratio of the amount of transcripts having exons 6, 7, and 8 in tandem (“6-7-8”) over the total amount of “6-7-8” transcripts and transcripts having exons 6 and 8 in tandem (“6-8”). As shown in the figures, certain ASOs, such as ASO-19, ASO-20, ASO-21, ASO-22, induced increase in the relative amount of “6-7-8” transcripts, suggesting an increase in the inclusion of exon 7 in mature OPA1 mRNA transcripts. Some ASOs, such as ASO-23, ASO-24, ASO-25, ASO-26, ASO-28, ASO-29, ASO-30, ASO-31, ASO-32, ASO-33, ASO-34, ASO-35, ASO-36, ASO-37, and ASO-38, in contrast, induced reduction in the relative amount of “6-7-8” transcripts, suggesting a reduction in the inclusion of exon 7 in mature OPA1 mRNA transcript. FIGS. 27C and 27D show the Ct values for the qPCR reaction (upper plots) for, and quantification of the relative amount (bottom plots) of, OPA1 transcripts having exons 6 and 8 (“Ex6-8”) and OPA1 transcripts having exons 7 and 8 (“Ex7-8”), respectively. Cells treated with ASO-29, ASO20, ASO-21, and ASO-22 showed reduced amount of “Ex6-8” transcripts and increased amount of “Ex7-8” transcripts, consistent with the suggestion that these ASOs promote the inclusion of exon 7 in OPA1 mature mRNA transcripts. Cells treated with ASO-23, ASO-24, ASO-25, ASO-26, ASO-28, ASO-29, ASO-30, ASO-31, ASO-32, ASO-33, ASO-34, ASO-35, ASO-36, ASO-37, and ASO-38 showed increase in the amount of “Ex6-8” transcripts and decrease in the amount of “Ex7-8” transcripts, consistent with the suggestion that these ASOs promote the exclusion of exon 7 from OPA1 mature mRNA transcripts.

### Example 2.17: Exemplary OPA1 Antisense Oligomers Modulate Inclusion of Exon 7, Exon 7x, or Both in OPA1 mRNA Transcript and Modulate Expression Level of OPA1 Protein

[0717] HEK293 cells were transfected with different exemplary OPA1 modified 2′MOE-PS (2′ methoxyethyl and phosphorothioate) ASOs. Each well of HEK293 cells (about 50,000 cells/well) was treated with an exemplary ASO at 80 nM final concentration in the presence of 0.9 μL of Lipofectamine® RNAiMax. Here, the cells were harvested 72 hours after transfection to test each ASO's effect on OPA1 mRNA and protein expression. The cells were treated with cycloheximide (50 μg/mL) for 3 hours prior to harvest for mRNA analysis. FIG. 28A shows a gel image of PCR products from RT-PCR reaction using probes spanning exon 6 and 8. As shown in the figure, ASO-14 induced reduction in the amount of transcripts having exons 6, 7, 7x, and 8 in tandem (“6-7-7x-8”). ASO-32, ASO-38, and ASO-39 induced significant reduction in the amount of “6-7-8” transcripts, and modest reduction in the amount of “6-7-7x-8” transcripts, whereas ASO-40 induced increase in the amount of “6-7-8” transcripts. These data suggest that ASO-14 promotes exclusion of exon 7x from OPA1 mRNA transcript, ASO-32, ASO-38, and ASO-39 promote exclusion of exon 7 from OPA1 mRNA transcript, and they also promote exclusion of exon 7x from OPA1 mRNA transcript. In contrast, the data suggest that ASO-40 promotes inclusion of exon 7 in OPA1 mRNA transcript.

[0718] FIG. 28B shows an image of a Western blot using antibody against OPA1 protein and antibody against β-tubulin protein in the cells after treatment with different ASOs or no ASO (control), as well as Ponceau staining image of the same blot. FIG. 28B also shows plots summarizing the amount of OPA1 protein under different treatment conditions as normalized relative to the amount of β-tubulin or Ponceau staining intensity. The data suggest that ASO-14, ASO-32, ASO-38, and ASO-39 all may induce increase in OPA1 protein expression, whereas ASO-40 may not significantly change the expression level of OPA1 protein.

[0719] Dose response of ASO-32 and ASO-38 were also tested along with ASO-14. ASO treatment, cell harvest, and RNA isolation and analysis were conducted similarly to the experiment above in this example. Each well of HEK293 cells (about 50,000 cells/well) were treated with either 20 nM or 80 nM of ASO-14, ASO-32, ASO-38, or no ASO. FIG. 28C shows a gel image of products from RT-PCR reaction using probes spanning exon 6 and 8. FIG. 28D shows quantification of qPCR Ct values for reactions under different experimental conditions using probes spanning exons and 8 (“Ex6-8”), probes spanning exons 7 and 8 (“Ex7-8”), and probes spanning exons 23 and 24 (“Ex23-24”), and FIG. 28E shows quantification of relative amount of the corresponding transcripts. The data show consistent observation that ASO-32 and ASO-38 promote exclusion of exon 7 from mature OPA1 mRNA transcripts. FIG. 28F shows the data on the OPA1 expression level after treatment of ASO-14, ASO-32, or ASO-38. Consistently, ASO-32 and ASO-38 increased OPA1 protein level.

### Example 2.18: ASO Microwalk Evaluated by RT-qPCR

[0720] In one experiment, microwalk was conducted to test ASOs that have sequences listed in Table 7. Briefly, about 30,000 HEK293 cells per well were treated gymnotically with 20 μM one of the 20 exemplary ASOs (free uptake) listed in Table 7 for 72 hours. After the treatment, the cells were harvested for analysis. RT-PCR reactions were conducted for products corresponding to Exon 7 or Exon 7x inclusion and full-length.

[0721] FIGS. 29A-30B demonstrate data from experiments with some of the 18-mers (named ASO-41 to ASO-48) listed in Table 7. FIGS. 29A-29B show the Ct values for the qPCR reaction (upper plots) for, and quantification of the relative amount (lower plots; normalized to Ct value of RPL32 qPCR product) of, OPA1 transcripts having exons 6 and 8 (“Ex6-8”) and OPA1 transcripts having exons 7 and 8 (“Ex7-8”), respectively. FIG. 29C shows the Ct values for the qPCR reaction (upper plots) for, and quantification of the relative amount (lower plots; normalized to Ct value of RPL32 qPCR product) of, OPA1 transcripts having exons 23 and 24 (“Ex23-24”), and FIG. 29D shows the Ct values for RPL32 transcripts as a loading control. These data demonstrate that cells treated with ASO-41 to ASO-47 all showed increased the amount of “Ex6-8” transcripts and decreased the amount of “Ex7-8” transcripts, suggesting these ASOs promote exclusion of Exon 7 from OPA1 transcripts. No cycloheximide was applied to the cells that were subject to these analyses for Exon 7 inclusion. FIG. 30A shows the Ct values for the qPCR reaction (upper plots) for, and quantification of the relative amount (lower plots; normalized to Ct value of RPL32 qPCR product) of, OPA1 transcripts having exons 7x and 8 (“Ex7x-8”), and FIG. 30B shows the Ct values for RPL32 transcripts as a loading control. These data demonstrate that cells treated with ASO-41 to ASO-44 all showed decreased amounts of “Ex7x-8” transcripts, suggesting these ASOs promote exclusion of Exon 7x from OPA1 transcripts. Cycloheximide was applied to the cells for these analyses for Exon 7x inclusion.

[0722] FIGS. 31A-32C demonstrate data from experiments with some of the 16-mers (named ASO-49 to ASO-60) listed in Table 7. FIGS. 31A-31B show the Ct values for the qPCR reaction (upper plots) for, and quantification of, the relative amount (lower plots; normalized to Ct value of RPL32 qPCR product) of OPA1 transcripts having exons 6 and 8 (“Ex6-8”) and OPA1 transcripts having exons 7 and 8 (“Ex7-8”), respectively. FIG. 31C shows the Ct values for the qPCR reaction (upper plots) for, and quantification of the relative amount (lower plots; normalized to Ct value of RPL32 qPCR product) of OPA1 transcripts having exons 23 and 24 (“Ex23-24”), and FIG. 31D shows the Ct values for RPL32 transcripts. These data demonstrate that cells treated with ASO-49 to ASO-60 all showed increased amounts of “Ex6-8” transcripts and decreased amounts of “Ex7-8” transcripts, suggesting these ASOs promote exclusion of Exon 7 from OPA1 transcripts. No cycloheximide was applied to the cells that were subject to these analyses for Exon 7 inclusion. FIG. 32A shows the Ct values for the qPCR reaction (upper plots) for, and quantification of, the relative amount (lower plots; normalized to Ct value of RPL32 qPCR product) of OPA1 transcripts having exons 7x and 8 (“Ex7x-8”), and FIG. 32C shows the Ct values for RPL32 transcripts as a loading control. These data demonstrate that cells treated with ASO-49 to ASO-56 all showed decreased amounts of “Ex7x-8” transcripts, suggesting these ASOs promote exclusion of Exon 7x from OPA1 transcripts. Cycloheximide was applied to the cells for these analyses for Exon 7x inclusion.

[0723] Another experiment was conducted to assess transfection dose response relationship with select ASOs among the ASOs tested above in the microwalk analyses. Briefly, 100,000 HEK293 cells per well were transfected with 1, 3, 10, or 30 nM of an exemplary ASO with 0.45 μL lipofectamine for 24 hours. Cells were later harvested for qPCR analysis as above. FIGS. 33A-33B show plots depicting the dose response curves of relative amounts of different OPA1 transcripts versus the transfection concentration of exemplary ASOs, ASO-14, 38, 41, 42, 43, 44, 49, 51, 52, and 53. The plots show that, as a general trend, in cells treated with ASOs like ASO-38, 41, 42, 43, 44, 49, 51, 52, or 53, the amount of OPA1 transcripts having Exon 6 and 8 (“6-8”) increased, while the amounts of OPA1 transcripts having Exon 7 and 8 (“7-8”) and OPA1 transcripts having Exon 7x and 8 (“7x-8”) decreased as the concentration of the exemplary ASO increased. In contrast, in cells treated with ASO-14, while “7x-8” decreased and “6-8” transcripts increased, “7-8” transcripts did not significantly change. These data suggest that ASO-38, 41, 42, 43, 44, 49, 51, 52, and 53 may all promote exclusion of both Exon 7 and Exon 7x, while ASO-14 may promote exclusion of Exon 7x.

TABLE 5
Exemplary OPA1 ASO sequences
(Organism: synthetic construct)

| | | Coordinates | |
|---|---|---|---|
| SEQ | | GRCh38/hg38: chr3 | |
| ID | | Oligo | Oligo |
| NO | Sequence (5′-3′) | Start | End |
| 6 | AGGCCATTCTGAAATTCT | 193628406 | 193628423 |
| 7 | CATTGAGGCCATTCTGAA | 193628411 | 193628428 |
| 8 | TAAGGCATTGAGGCCATT | 193628416 | 193628433 |
| 9 | CCTATTAAGGCATTGAGG | 193628421 | 193628438 |
| 10 | TTCTTCCTATTAAGGCAT | 193628426 | 193628443 |
| 11 | AGTATTTCTTCCTATTAA | 193628431 | 193628448 |
| 12 | TTTCAAGTATTTCTTCCT | 193628436 | 193628453 |
| 13 | AAAAATTTCAAGTATTTC | 193628441 | 193628458 |
| 14 | AATTTAAAAATTTCAAGT | 193628446 | 193628463 |
| 15 | GCCCTAATTTAAAAATTT | 193628451 | 193628468 |
| 16 | ACCAAGCCCTAATTTAAA | 193628456 | 193628473 |
| 17 | ACAAAACCAAGCCCTAAT | 193628461 | 193628478 |
| 18 | TCCTCACAAAACCAAGCC | 193628466 | 193628483 |
| 19 | CTAGCTCCTCACAAAACC | 193628471 | 193628488 |
| 20 | CTTTACTAGCTCCTCACA | 193628476 | 193628493 |
| 21 | AAAACCTTTACTAGCTCC | 193628481 | 193628498 |
| 22 | AGAGAAAAACCTTTACTA | 193628486 | 193628503 |
| 23 | CTGAAAGAGAAAAACCTT | 193628491 | 193628508 |
| 24 | AAGCTGAAAGAGAAAAAC | 193628494 | 193628511 |
| 25 | CTAAAGCTGAAAGAGAAA | 193628497 | 193628514 |
| 26 | AAGCTAAAGCTGAAAGAG | 193628500 | 193628517 |
| 27 | AACAAGCTAAAGCTGAAA | 193628503 | 193628520 |
| 28 | AGAAACAAGCTAAAGCTG | 193628506 | 193628523 |
| 29 | CGCAGAAACAAGCTAAAG | 193628509 | 193628526 |
| 30 | TCCTCCGCAGAAACAAGC | 193628514 | 193628531 |
| 31 | CGGAATCCTCCGCAGAAA | 193628519 | 193628536 |
| 32 | AAGAGCGGAATCCTCCGC | 193628524 | 193628541 |
| 33 | GGAGAAAGAGCGGAATCC | 193628529 | 193628546 |
| 34 | CTGATGGAGAAAGAGCGG | 193628534 | 193628551 |
| 35 | TGAAACTGATGGAGAAAG | 193628539 | 193628556 |
| 36 | GGCTATGAAACTGATGGA | 193628544 | 193628561 |
| 37 | TCCAGGGCTATGAAACTG | 193628549 | 193628566 |
| 38 | ACAATTCCAGGGCTATGA | 193628554 | 193628571 |
| 39 | TTTCTACAATTCCAGGGC | 193628559 | 193628576 |
| 40 | GAGCTTTTCTACAATTCC | 193628564 | 193628581 |
| 41 | AACCAGAGCTTTTCTACA | 193628569 | 193628586 |
| 42 | CTTGAAACCAGAGCTTTT | 193628574 | 193628591 |
| 43 | ATGGTCTTGAAACCAGAG | 193628579 | 193628596 |
| 44 | TATCAATGGTCTTGAAAC | 193628584 | 193628601 |
| 45 | ATGGATATCAATGGTCTT | 193628589 | 193628606 |
| 46 | CAGAAATGGATATCAATG | 193628594 | 193628611 |
| 47 | CCTGACAGAAATGGATAT | 193628599 | 193628616 |
| 48 | CACCCTGACAGAAATGGA | 193628602 | 193628619 |
| 49 | ACTCACCCTGACAGAAAT | 193628605 | 193628622 |
| 50 | AAAACTCACCCTGACAGA | 193628608 | 193628625 |
| 51 | TTTAAAACTCACCCTGAC | 193628611 | 193628628 |
| 52 | AAATTTAAAACTCACCCT | 193628614 | 193628631 |
| 53 | AATAAATTTAAAACTCAC | 193628617 | 193628634 |
| 54 | CATGAAATAAATTTAAAA | 193628622 | 193628639 |
| 55 | TGCATCATGAAATAAATT | 193628627 | 193628644 |
| 56 | TTGTTTGCATCATGAAAT | 193628632 | 193628649 |
| 57 | ATATATTGTTTGCATCAT | 193628637 | 193628654 |
| 58 | GTTCAATATATTGTTTGC | 193628642 | 193628659 |
| 59 | CTGTTGTTCAATATATTG | 193628647 | 193628664 |
| 60 | ATGTCCTGTTGTTCAATA | 193628652 | 193628669 |
| 61 | AGTTCATGTCCTGTTGTT | 193628657 | 193628674 |
| 62 | GAACAAGTTCATGTCCTG | 193628662 | 193628679 |
| 63 | AACAAGAACAAGTTCATG | 193628667 | 193628684 |
| 64 | CTTACAACAAGAACAAGT | 193628672 | 193628689 |
| 65 | AGCCACTTACAACAAGAA | 193628677 | 193628694 |
| 66 | AATTCAGCCACTTACAAC | 193628682 | 193628699 |
| 67 | GATAAAATTCAGCCACTT | 193628687 | 193628704 |
| 68 | TTACTGATAAAATTCAGC | 193628692 | 193628709 |
| 69 | GTGCTTTACTGATAAAAT | 193628697 | 193628714 |
| 70 | TTGATGTGCTTTACTGAT | 193628702 | 193628719 |
| 71 | TGGAGAAAGAGCGGAATC | 193628530 | 193628547 |
| 72 | ATGGAGAAAGAGCGGAAT | 193628531 | 193628548 |
| 73 | GATGGAGAAAGAGCGGAA | 193628532 | 193628549 |
| 74 | TGATGGAGAAAGAGCGGA | 193628533 | 193628550 |
| 75 | ACTGATGGAGAAAGAGCG | 193628535 | 193628552 |
| 76 | AACTGATGGAGAAAGAGC | 193628536 | 193628553 |
| 77 | AAACTGATGGAGAAAGAG | 193628537 | 193628554 |
| 78 | GAAACTGATGGAGAAAGA | 193628538 | 193628555 |
| 79 | ATGAAACTGATGGAGAAA | 193628540 | 193628557 |
| 80 | TATGAAACTGATGGAGAA | 193628541 | 193628558 |
| 81 | CTATGAAACTGATGGAGA | 193628542 | 193628559 |
| 82 | GCTATGAAACTGATGGAG | 193628543 | 193628560 |
| 83 | GGGCTATGAAACTGATGG | 193628545 | 193628562 |
| 84 | AGGGCTATGAAACTGATG | 193628546 | 193628563 |
| 85 | CAGGGCTATGAAACTGAT | 193628547 | 193628564 |
| 86 | CCAGGGCTATGAAACTGA | 193628548 | 193628565 |
| 87 | CTGATGGAGAAAGAGCGGAATC | 193628530 | 193628551 |
| 88 | CTGATGGAGAAAGAGCGGAA | 193628532 | 193628551 |
| 89 | AACTGATGGAGAAAGAGCGGAA | 193628532 | 193628553 |
| 90 | AACTGATGGAGAAAGAGCGG | 193628534 | 193628553 |
| 91 | GAAACTGATGGAGAAAGAGCGG | 193628534 | 193628555 |
| 92 | GGCTATGAAACTGATGGAGAAA | 193628540 | 193628561 |
| 93 | GGCTATGAAACTGATGGAGA | 193628542 | 193628561 |
| 94 | AGGGCTATGAAACTGATGGAGA | 193628542 | 193628563 |
| 95 | AGGGCTATGAAACTGATGGA | 193628544 | 193628563 |
| 96 | CCAGGGCTATGAAACTGATGGA | 193628544 | 193628565 |
| 97 | TTCTTACCCATTTAATTA | 193655041 | 193655059 |
| 98 | TGCTTCTTACCCATTTAA | 193655044 | 193655062 |
| 99 | TAATGCTTCTTACCCATT | 193655047 | 193655065 |
| 100 | AGATAATGCTTCTTACCC | 193655050 | 193655068 |
| 101 | CAGATAATGCTTCTTACC | 193655051 | 193655069 |
| 102 | CCCTTCAGATAATGCTTC | 193655056 | 193655074 |
| 103 | CTACTCCCTTCAGATAAT | 193655061 | 193655079 |
| 104 | AGCTCCTACTCCCTTCAG | 193655066 | 193655084 |
| 105 | TTCACAGCTCCTACTCCC | 193655071 | 193655089 |
| 106 | TAAAATTCACAGCTCCTA | 193655076 | 193655094 |
| 107 | AAATCTAAAATTCACAGC | 193655081 | 193655099 |
| 108 | GAATAAAATCTAAAATTC | 193655086 | 193655104 |
| 109 | GATGGGAATAAAATCTAA | 193655091 | 193655109 |
| 110 | GCTGTGATGGGAATAAAA | 193655096 | 193655114 |
| 111 | TAGAGGCTGTGATGGGAA | 193655101 | 193655119 |
| 112 | AAAGATAGAGGCTGTGAT | 193655106 | 193655124 |
| 113 | AAAAGAAAGATAGAGGCT | 193655111 | 193655129 |
| 114 | GACCTAAAAGAAAGATAG | 193655116 | 193655134 |
| 115 | ATAAAGACCTAAAAGAAA | 193655121 | 193655139 |
| 116 | GAGATATAAAGACCTAAA | 193655126 | 193655144 |
| 117 | GGCTGTGATGGGAATAAA | 193655097 | 193655115 |
| 118 | AGGCTGTGATGGGAATAA | 193655098 | 193655116 |
| 119 | GAGGCTGTGATGGGAATA | 193655099 | 193655117 |
| 120 | AGAGGCTGTGATGGGAAT | 193655100 | 193655118 |
| 121 | ATAGAGGCTGTGATGGGA | 193655102 | 193655120 |
| 122 | GATAGAGGCTGTGATGGG | 193655103 | 193655121 |
| 123 | AGATAGAGGCTGTGATGG | 193655104 | 193655122 |
| 124 | AAGATAGAGGCTGTGATG | 193655105 | 193655123 |
| 125 | TAGAGGCTGTGATGGGAATAAA | 193655097 | 193655119 |
| 126 | ATAGAGGCTGTGATGGGAATAA | 193655098 | 193655120 |
| 127 | GATAGAGGCTGTGATGGGAATA | 193655099 | 193655121 |
| 128 | AGATAGAGGCTGTGATGGGAAT | 193655100 | 193655122 |
| 129 | AAGATAGAGGCTGTGATGGGAA | 193655101 | 193655123 |
| 130 | GAGGCTGTGATGGGAATAAA | 193655097 | 193655117 |
| 131 | AGAGGCTGTGATGGGAATAA | 193655098 | 193655118 |
| 132 | TAGAGGCTGTGATGGGAATA | 193655099 | 193655119 |
| 133 | ATAGAGGCTGTGATGGGAAT | 193655100 | 193655120 |
| 134 | GATAGAGGCTGTGATGGGAA | 193655101 | 193655121 |
| 135 | AGATAGAGGCTGTGATGGGA | 193655102 | 193655122 |
| 136 | AAGATAGAGGCTGTGATGGG | 193655103 | 193655123 |
| 137 | CTGTGATGGGAATAAA | 193655097 | 193655113 |
| 138 | GCTGTGATGGGAATAA | 193655098 | 193655114 |
| 139 | GGCTGTGATGGGAATA | 193655099 | 193655115 |
| 140 | AGGCTGTGATGGGAAT | 193655100 | 193655116 |
| 141 | GAGGCTGTGATGGGAA | 193655101 | 193655117 |
| 142 | AGAGGCTGTGATGGGA | 193655102 | 193655118 |
| 143 | TAGAGGCTGTGATGGG | 193655103 | 193655119 |
| 144 | ATAGAGGCTGTGATGG | 193655104 | 193655120 |
| 145 | GATAGAGGCTGTGATG | 193655105 | 193655121 |
| 146 | AGATAGAGGCTGTGAT | 193655106 | 193655122 |
| 147 | AAGATAGAGGCTGTGA | 193655107 | 193655123 |
| 148 | AGGCTGTGATGTGAATAA | 193655099 | 193655116 |
| 149 | AGAGGCTGTGATGTGAAT | 193655101 | 193655118 |
| 150 | TAGAGGCTGTGATGTGAA | 193655102 | 193655119 |
| 151 | GATAGAGGCTGTGATTGG | 193655104 | 193655121 |
| 152 | GGCTGTGATGTGAATA | 193655100 | 193655115 |
| 153 | GAGGCTGTGATGTGAA | 193655102 | 193655117 |
| 154 | TAGAGGCTGTGATTGG | 193655104 | 193655119 |
| 155 | ATGAAACTGATGGAGA | 193628542 | 193628557 |
| 156 | CTATGAAACTGATGGA | 193628544 | 193628559 |
| 157 | GGCTATGAAACTGATG | 193628546 | 193628561 |
| 158 | GAAACTGATGGAGA | 193628542 | 193628555 |
| 159 | ATGAAACTGATGGA | 193628544 | 193628557 |
| 160 | CTATGAAACTGATG | 193628546 | 193628559 |
| 161 | GGCTATGAAACTGA | 193628548 | 193628561 |
| 162 | TAGAGGCTGTGATGGGAATAAAAT | 193655096 | 193655119 |
| 163 | ATAGAGGCTGTGATGGGAATAAAA | 193655097 | 193655120 |
| 164 | ATAGAGGCTGTGATGGGAATAAAAT | 193655096 | 193655120 |
| 165 | AAAGATAGAGGCTGTGATGGGAATA | 193655100 | 193655124 |
| 166 | GGCTATGAAACTGATGGAGAA | 193628541 | 193628561 |
| 167 | GGCTATGAAACTGATGGAGAAAGA | 193628538 | 193628561 |
| 168 | AGGGCTATGAAACTGATGGAGAAAG | 193628539 | 193628563 |
| 169 | CATTTAATTAAATTATAT | 193655033 | 193655051 |
| 170 | CCATTTAATTAAATTATA | 193655034 | 193655052 |
| 171 | CCCATTTAATTAAATTAT | 193655035 | 193655053 |
| 172 | ACCCATTTAATTAAATTA | 193655036 | 193655054 |
| 173 | TACCCATTTAATTAAATT | 193655037 | 193655055 |
| 174 | TTACCCATTTAATTAAAT | 193655038 | 193655056 |
| 175 | CTTACCCATTTAATTAAA | 193655039 | 193655057 |
| 176 | TCTTACCCATTTAATTAA | 193655040 | 193655058 |
| 177 | GATAGAGGCTGTGATGG | 193655104 | 193655122 |
| 178 | GGCTGTGAAACTGATGGA | 89481662 | 89481679 |
| 179 | GGCTGTGAAACTGATGGAGA | 89481660 | 89481679 |
| 180 | GCTATGAAACTGATGG | 193628545 | 193628560 |
| 181 | TATGAAACTGATGG | 193628545 | 193628558 |
| 182 | GCTATGAAACTGAT | 193628547 | 193628560 |
| 183 | GCTGTGAAACTGATGGAGAA | 89481659 | 89481678 |
| 184 | GGGCTGTGAAACTGATGGAG | 89481661 | 89481680 |
| 185 | TGTGAAACTGATGGAGAA | 89481659 | 89481676 |
| 186 | CTGTGAAACTGATGGAGA | 89481660 | 89481677 |
| 187 | GCTGTGAAACTGATGGAG | 89481661 | 89481678 |
| 188 | GGGCTGTGAAACTGATGG | 89481663 | 89481680 |
| 189 | TGAAACTGATGGAGAA | 89481659 | 89481674 |
| 190 | GTGAAACTGATGGAGA | 89481660 | 89481675 |
| 191 | TGTGAAACTGATGGAG | 89481661 | 89481676 |
| 192 | CTGTGAAACTGATGGA | 89481662 | 89481677 |
| 193 | GCTGTGAAACTGATGG | 89481663 | 89481678 |
| 194 | GGCTGTGAAACTGATG | 89481664 | 89481679 |
| 195 | GGGCTGTGAAACTGAT | 89481665 | 89481680 |
| 196 | CGGTCCAGGAATGAC | 193593285 | 193593303 |
| 197 | CCGGTCCAGGAATGA | 193593286 | 193593304 |
| 198 | CCCGGTCCAGGAATG | 193593287 | 193593305 |
| 199 | TCCCGGTCCAGGAAT | 193593288 | 193593306 |
| 200 | CTCCCGGTCCAGGAA | 193593289 | 193593307 |
| 201 | GCTCCCGGTCCAGGA | 193593290 | 193593308 |
| 202 | GGCTCCCGGTCCAGG | 193593291 | 193593309 |
| 203 | CGGGAGCCCCCGTGT | 193593318 | 193593336 |
| 204 | GCGGGAGCCCCCGTG | 193593319 | 193593337 |
| 205 | CGCGGGAGCCCCCGT | 193593320 | 193593338 |
| 206 | ACGCGGGAGCCCCCG | 193593321 | 193593339 |
| 207 | CACGCGGGAGCCCCC | 193593322 | 193593340 |
| 208 | CCACGCGGGAGCCCC | 193593323 | 193593341 |
| 209 | GCCACGCGGGAGCCC | 193593324 | 193593342 |
| 210 | GGCCACGCGGGAGCC | 193593325 | 193593343 |
| 211 | CGGCCACGCGGGAGC | 193593326 | 193593344 |
| 212 | ACGGCCACGCGGGAG | 193593327 | 193593345 |
| 213 | GACGGCCACGCGGGA | 193593328 | 193593346 |
| 214 | AGACGGCCACGCGGG | 193593329 | 193593347 |
| 215 | GCTAGGGAGGGATGGTTA | 193625988 | 193626006 |
| 216 | TGTAAGCTAGGGAGGGAT | 193625993 | 193626011 |
| 217 | ACAGATGTAAGCTAGGGA | 193625998 | 193626016 |
| 218 | AAGGAACAGATGTAAGCT | 193626003 | 193626021 |
| 219 | CAACAAAGGAACAGATGT | 193626008 | 193626026 |
| 220 | GGGTGCAACAAAGGAACA | 193626013 | 193626031 |
| 221 | ACCAAGGGTGCAACAAAG | 193626018 | 193626036 |
| 222 | GTTAAACCAAGGGTGCAA | 193626023 | 193626041 |
| 223 | ATAATGTTAAACCAAGGG | 193626028 | 193626046 |
| 224 | GGAGAATAATGTTAAACC | 193626033 | 193626051 |
| 225 | GGGGAGGAGAATAATGTT | 193626038 | 193626056 |
| 226 | AAATTGGGGAGGAGAATA | 193626043 | 193626061 |
| 227 | AGAGGAAATTGGGGAGGA | 193626048 | 193626066 |
| 228 | GGAGAAGAGGAAATTGGG | 193626053 | 193626071 |
| 229 | AATGAGGAGAAGAGGAAA | 193626058 | 193626076 |
| 230 | TTCACAATGAGGAGAAGA | 193626063 | 193626081 |
| 231 | ACGAGTTCACAATGAGGA | 193626068 | 193626086 |
| 232 | CTGCCACGAGTTCACAAT | 193626073 | 193626091 |
| 233 | AGACCCTGCCACGAGTTC | 193626078 | 193626096 |
| 234 | CAAGCAGACCCTGCCACG | 193626083 | 193626101 |
| 235 | CTCACCAAGCAGACCCTG | 193626088 | 193626106 |
| 236 | GAGCTCACCAAGCAGACC | 193626091 | 193626109 |
| 237 | AGAATGAGCTCACCAAGC | 193626096 | 193626114 |
| 238 | GTAAGAGAATGAGCTCAC | 193626101 | 193626119 |
| 239 | TTGTTGTAAGAGAATGAG | 193626106 | 193626124 |
| 240 | ATTTGTTGTTGTAAGAGA | 193626111 | 193626129 |
| 241 | CTTGAATTTGTTGTTGTA | 193626116 | 193626134 |
| 242 | ATGCTCTTGAATTTGTTG | 193626121 | 193626139 |
| 243 | TCTTCATGCTCTTGAATT | 193626126 | 193626144 |
| 244 | CTTCCTCTTCATGCTCTT | 193626131 | 193626149 |
| 245 | GCGCGCTTCCTCTTCATG | 193626136 | 193626154 |
| 246 | GCTCTGCGCGCTTCCTCT | 193626141 | 193626159 |
| 247 | GGCCAGCGGCTCTGCGCG | 193626149 | 193626167 |
| 248 | ATATTGGCCAGCGGCTCT | 193626154 | 193626172 |
| 249 | GTGCTATATTGGCCAGCG | 193626159 | 193626177 |
| 250 | AGCTCGTGCTATATTGGC | 193626164 | 193626182 |
| 251 | GGCATAGCTCGTGCTATA | 193626169 | 193626187 |
| 252 | TGTTGGGCATAGCTCGTG | 193626174 | 193626192 |
| 253 | GCTTCTGTTGGGCATAGC | 193626179 | 193626197 |
| 254 | CTTGCGCTTCTGTTGGGC | 193626184 | 193626202 |
| 255 | CACCTTGCGCTTCTGTTG | 193626187 | 193626205 |
| 256 | TCCATCACCTTGCGCTTC | 193626192 | 193626210 |
| 257 | AACCATCCATCACCTTGC | 193626197 | 193626215 |
| 258 | CCTTAAACCATCCATCAC | 193626202 | 193626220 |
| 259 | AGCCCCCTTAAACCATCC | 193626207 | 193626225 |
| 260 | TCGGTAGCCCCCTTAAAC | 193626212 | 193626230 |
| 261 | ATGTATCGGTAGCCCCCT | 193626217 | 193626235 |
| 262 | TGTGAATGTATCGGTAGC | 193626222 | 193626240 |
| 263 | ATTAGTGTGAATGTATCG | 193626227 | 193626245 |
| 264 | GGCTGATTAGTGTGAATG | 193626232 | 193626250 |
| 265 | GAAATGGCTGATTAGTGT | 193626237 | 193626255 |
| 266 | TGGCAGAAATGGCTGATT | 193626242 | 193626260 |
| 267 | GATCTTGGCAGAAATGGC | 193626247 | 193626265 |
| 268 | GACATGATCTTGGCAGAA | 193626252 | 193626270 |
| 269 | GAGGTGACATGATCTTGG | 193626257 | 193626275 |
| 270 | AGATTGAGGTGACATGAT | 193626262 | 193626280 |
| 271 | TGAACAGATTGAGGTGAC | 193626267 | 193626285 |
| 272 | GTCCATGAACAGATTGAG | 193626272 | 193626290 |
| 273 | TTGGAGTCCATGAACAGA | 193626277 | 193626295 |
| 274 | TGTATTTGGAGTCCATGA | 193626282 | 193626300 |
| 275 | TTTCTTGTATTTGGAGTC | 193626287 | 193626305 |

TABLE 6
Exemplary OPA1 ASO sequences (Organism: synthetic construct)

| | | | Coordinates: | |
|---|---|---|---|---|
| SEQ | | | GRCh38/hg38: chr3 | |
| ID NO | Region | Sequence (5′-3′) | Oligo Start | Oligo End |
| 215 | OPA1-IVS6-86 | GCTAGGGAGGGATGGTTA | 193625988 | 193626006 |
| 216 | OPA1-IVS6-81 | TGTAAGCTAGGGAGGGAT | 193625993 | 193626011 |
| 217 | OPA1-IVS6-76 | ACAGATGTAAGCTAGGGA | 193625998 | 193626016 |
| 218 | OPA1-IVS6-71 | AAGGAACAGATGTAAGCT | 193626003 | 193626021 |
| 227 | OPA1-IVS6-26 | AGAGGAAATTGGGGAGGA | 193626048 | 193626066 |
| 228 | OPA1-IVS6-21 | GGAGAAGAGGAAATTGGG | 193626053 | 193626071 |
| 229 | OPA1-IVS6-16 | AATGAGGAGAAGAGGAAA | 193626058 | 193626076 |
| 230 | OPA1-IVS6-11 | TTCACAATGAGGAGAAGA | 193626063 | 193626081 |
| 231 | OPA1-IVS6-6 | ACGAGTTCACAATGAGGA | 193626068 | 193626086 |
| 232 | OPA1-IVS6-1 | CTGCCACGAGTTCACAAT | 193626073 | 193626091 |
| 233 | OPA1-IVS6-EX7 + 5 | AGACCCTGCCACGAGTTC | 193626078 | 193626096 |
| 234 | OPA1-IVS6-EX7 + 10 | CAAGCAGACCCTGCCACG | 193626083 | 193626101 |
| 235 | OPA1-IVS6-EX7 + 15 | CTCACCAAGCAGACCCTG | 193626088 | 193626106 |
| 236 | OPA1-EX7 + 1 | GAGCTCACCAAGCAGACC | 193626091 | 193626109 |
| 237 | OPA1-EX7 + 6 | AGAATGAGCTCACCAAGC | 193626096 | 193626114 |
| 238 | OPA1-EX7 + 11 | GTAAGAGAATGAGCTCAC | 193626101 | 193626119 |
| 239 | OPA1-EX7 + 16 | TTGTTGTAAGAGAATGAG | 193626106 | 193626124 |
| 240 | OPA1-EX7 + 21 | ATTTGTTGTTGTAAGAGA | 193626111 | 193626129 |
| 241 | OPA1-EX7 + 26 | CTTGAATTTGTTGTTGTA | 193626116 | 193626134 |
| 242 | OPA1-EX7 + 31 | ATGCTCTTGAATTTGTTG | 193626121 | 193626139 |
| 250 | OPA1-EX7 − 21 | AGCTCGTGCTATATTGGC | 193626164 | 193626182 |
| 267 | OPA1-IVS7 + 46 | GATCTTGGCAGAAATGGC | 193626247 | 193626265 |

TABLE 7
Exemplary OPA1 ASO sequences (Organism: synthetic construct)

| | | | Coordinates: | |
|---|---|---|---|---|
| SEQ | | | GRCh38/hg38: chr3 | |
| ID NO | Region | Sequence (5′-3′) | Oligo Start | Oligo End |
| 280 | OPA1-EX7 + 27 | TCTTGAATTTGTTGTTGT | 193626117 | 193626135 |
| 281 | OPA1-EX7 + 28 | CTCTTGAATTTGTTGTTG | 193626118 | 193626136 |
| 282 | OPA1-EX7 + 29 | GCTCTTGAATTTGTTGTT | 193626119 | 193626137 |
| 283 | OPA1-EX7 + 30 | TGCTCTTGAATTTGTTGT | 193626120 | 193626138 |
| 284 | OPA1-EX7 + 32 | CATGCTCTTGAATTTGTT | 193626122 | 193626140 |
| 285 | OPA1-EX7 + 33 | TCATGCTCTTGAATTTGT | 193626123 | 193626141 |
| 286 | OPA1-EX7 + 34 | TTCATGCTCTTGAATTTG | 193626124 | 193626142 |
| 287 | OPA1-EX7 + 35 | CTTCATGCTCTTGAATTT | 193626125 | 193626143 |
| 288 | OPA1-EX7 + 26 | TGAATTTGTTGTTGTA | 193626116 | 193626132 |
| 289 | OPA1-EX7 + 27 | TTGAATTTGTTGTTGT | 193626117 | 193626133 |
| 290 | OPA1-EX7 + 28 | CTTGAATTTGTTGTTG | 193626118 | 193626134 |
| 291 | OPA1-EX7 + 29 | TCTTGAATTTGTTGTT | 193626119 | 193626135 |
| 292 | OPA1-EX7 + 30 | CTCTTGAATTTGTTGT | 193626120 | 193626136 |
| 293 | OPA1-EX7 + 31 | GCTCTTGAATTTGTTG | 193626121 | 193626137 |
| 294 | OPA1-EX7 + 32 | TGCTCTTGAATTTGTT | 193626122 | 193626138 |
| 295 | OPA1-EX7 + 33 | ATGCTCTTGAATTTGT | 193626123 | 193626139 |
| 296 | OPA1-EX7 + 34 | CATGCTCTTGAATTTG | 193626124 | 193626140 |
| 297 | OPA1-EX7 + 35 | TCATGCTCTTGAATTT | 193626125 | 193626141 |
| 298 | OPA1-EX7 + 36 | TTCATGCTCTTGAATT | 193626126 | 193626142 |
| 299 | OPA1-EX7 + 37 | CTTCATGCTCTTGAAT | 193626127 | 193626143 |

### Example 2.19: ASO-14 Mediates ATP Upregulation in OPA1 Haploinsufficient HEK293 Cell Line

[0724] The ATP levels generated through mitochondrial oxidative phosphorylation and the glycolytic pathway were measured in HEK293 cell lysates using a commercially available kit (Cat #ab83355, Abcam; USA) according to the manufacturer's instructions. Briefly, about 3×105 OPA1+/+(wildtype) and OPA1+/−HEK293 cells were plated in a T-25 flask and treated with 10 μM ASO-14. For the ATP test, 96-hours after treatment, cells were harvested, and two aliquots of cell suspension were prepared. One aliquot was processed for deproteinizing using commercially available kit (Cat #ab204708, Abcam; USA) to remove residual protein for executing ATP fluorescence assay to measure total ATP level. The second aliquot was used for BCA assay (Cat #23225, Thermo Fisher; USA) to measure total protein level. ATP level was then calculated by normalizing the measured total ATP level to the measured total protein level.

[0725] FIG. 34A summarizes the ATP level measured under each condition. In the mock group, untreated OPA1+/−HEK293 cells were found to have 0.79±0.02 ATP level as compared to untreated OPA1+/+HEK293 cells. There was about a 20% ATP deficit in OPA1+/−HEK293 cells. In comparison, OPA1+/−HEK293 cells treated with ASO-14 had ATP levels 0.88±0.01, significantly higher than the mock-treated OPA1+/−HEK293 cells, suggesting that treatment of ASO-14 reduced the deficit by about 50%. Data were collected from three independent experiments. (Statistics: Ordinary one-way ANOVA; ***P<0.0001; **P<0.0080).

[0726] FIGS. 34B-34C demonstrate the OPA1 protein under each condition. 96 hours after treatment with ASO-14 or no treatment (mock), cells were lysed with RIPA buffer and immunoblot blot was probed with antibodies targeting OPA1 and β-actin. The data show that treatment of ASO-14 upregulated about 18% OPA1 protein in OPA1+/− cells. FIG. 34B shows the immunoblot gel images. Multiple bands on the immunoblot image represent various isoforms of OPA1. FIG. 34C summarizes quantification of the immunoblot results. Untreated (mock) OPA1+/−HEK293 cells were found to have 46±0.5% OPA1 protein level as compared to untreated (mock) OPA1+/+HEK293 cells. OPA1+/+ cells treated with ASO-14 had OPA1 levels 123.2±1.3 of untreated OPA1+/+ cells. OPA1+/− cells treated with ASO-14 had OPA1 levels 54.54±0.6% of untreated OPA1+/+ cells. Statistics performed with corresponding mock. *** P<0.0001, by Ordinary one-Way ANOVA and ###P<0.0001, by Welch's t test. Data represent average of three technical replicates.

### Example 2.20: Exemplary Antisense Oligomers Restore OPA1 Expression in Cells with OPA1 Mutations from Diagnosed Patients

[0727] This example examines OPA1 mRNA and protein levels in cells with mutations in OPA1 gene from patients diagnosed with Autosomal dominant optic atrophy (ADOA), as well as effects of exemplary antisense oligomer ASO-14 on OPA1 mRNA and protein levels, and mitochondrial bioenergetics in the patient cells.

[0728] FIGS. 35A-35C summarize mRNA and protein expression of OPA1 gene in fibroblast cells from diagnosed patients that have a haploinsufficient mutation in the OPA1 gene: F34 (OPA1 canonical splice mutation at c.1608+1delGTGAGG); F35 (OPA1 frameshift mutation at c.2873_2876del); F36 (OPA1 frameshift mutation at c.635_636delAA). mRNA expression level of OPA1 gene in patient cells is about 50% to 60% of the mRNA level in wildtype (WT) cells (FIG. 35A); OPA1 protein level in patient cells is about 30% to about 40% of the protein level in WT cells (FIG. 35B). Histograms in FIGS. 35A-35B show mean±SEM of 3 independent experiments; one-way ANOVA compared to WT group (****P<0.0001). FIG. 35C shows a representative immunoblot image of OPA protein expression level in diseased fibroblast cells.

[0729] FIGS. 36A-36D demonstrate the effects of exemplary antisense oligomer, ASO-14, on OPA1 NMD exon inclusion, mRNA level, and protein level in wildtype (WT) fibroblast cells and fibroblast cells from diagnosed patients that have haploinsufficient mutation in OPA1 gene. The fibroblast cells were transfected with ASO-14 (40 nM), and RNA was isolated 24 hours after transfection and analyzed. For non-productive OPA1 mRNA measurement, cells were treated with cycloheximide (50 μg/mL) for 3 hours prior to RNA isolation. Immunoblot was performed 72 hours. post transfection with antibodies targeting OPA1 and β-tubulin. As shown in FIG. 36A, ASO-14 significantly decreased inclusion of NMD exon (exon 7x), measured by level of non-productive OPA1 mRNA, in WT cells and all diseased cells to lower than 20% of the level of the normalized level in WT cells. There was a trend of increase in total OPA1 mRNA level in all types of cells by the treatment of ASO-14 (FIG. 36B). Histograms in FIGS. 36A-36B show mean±SEM of 2-3 independent experiments; one-way ANOVA vs. Mock for respective cell line (*P<0.05; ***P<0.001; ****P<0.0001). Correspondingly, OPA1 protein level was significantly increased by the treatment of ASO-14 in all types of cells (FIGS. 36C-36D). FIG. 36C shows representative immunoblot images of OPA1 protein and loading control β-Tubulin under all types of conditions; FIG. 36D shows the statistical summary of the OPA1 protein levels, the histograms show mean SEM of 3 independent experiments; unpaired t-test vs. Mock for respective cell line (*P<0.05, ** P<0.01, ***<0.001).

[0730] FIGS. 37A-37E demonstrate that patient fibroblast cells (cell lines F35 and F36) show deficiencies in mitochondrial bioenergetics. FIG. 37A shows representative time courses of the oxygen consumption rate of WT cells, F35 cells, and F36 cells at baseline level and when challenged sequentially with oligomycin, FCCP, rotenone, and antimycin A. Patient fibroblast cells, F35 and F36 cells, were found to have reduced basal oxygen consumption rate (FIG. 37B), ATP-linked respiration (FIG. 37C), maximal respiration (FIG. 37D), and spare respiratory capacity (FIG. 37E), as compared to WT fibroblast cells. Units in FIGS. 37B-37E are pmol/min/cells, data normalized to wild-type (WT). Histograms in FIGS. 37B-37E show mean SEM of >18 individual measurements from 2 independent experiments; one-way ANOVA vs. WT (** P<0.01; **** P<0.0001).

[0731] FIGS. 38A-38D demonstrate that ASO-14 increased mitochondrial energetics in F35 patient cell line. As shown in the figures, treatment with 40 nM or 60 nM ASO-14 increased basal oxygen consumption rate (FIG. 38A), ATP-linked respiration (FIG. 38B), maximal respiration (FIG. 38C), and spare respiratory capacity (FIG. 38D) of F35 patient cells in a dose-dependent manner. Treatment with 20 nM ASO-14 also significantly increased spare respiratory capacity (FIG. 38D). In contrast, non-targeting ASO (NT ASO, targeting an unrelated gene) did not significantly alter the parameters at any of the tested concentrations. Units in the figures are pmol/min/cells; the Oxygen Consumption Rates (OCR) are normalized to total cell count and plotted to Mock (No ASO). The histograms show mean±SEM of >20 individual measurements from at least 3 independent experiments; one-way ANOVA vs. Mock (*P<0.05; ***P<0.001; ****P<0.0001).

[0732] FIGS. 39A-39D demonstrate that ASO-14 increased mitochondrial energetics in F36 patient cell line. As shown in the figures, ASO-14 also increased basal oxygen consumption rate (FIG. 39A), ATP-linked respiration (FIG. 39B), maximal respiration (FIG. 39C), and spare respiratory capacity (FIG. 39D) of F36 patient cells in a dose-dependent manner from 20 nM, 40 nM, to 60 nM. In contrast, non-targeting ASO did not significantly alter the parameters at 40 nM. Units in the figures are pmol/min/cells; the Oxygen Consumption Rates (OCR) are normalized to total cell count and plotted to Mock (No ASO). The histograms show mean SEM of >20 individual measurements from 2-5 independent experiments; one-way ANOVA vs. Mock (*P<0.05; ** P<0.01; *** P<0.001 **** P<0.0001).

[0733] The experiments in F35 and F36 cells suggest that the dose-dependent improvement in mitochondrial bioenergetics by ASO-14 is mutation-independent.

[0734] The foregoing preclinical data support the TANGO disease modifying approach in ADOA. As demonstrated by the data, the exemplary antisense oligomer, ASO-14, reduced non-productive exon inclusion, increased total OPA1 mRNA and protein expression in all three patient fibroblast cell lines; increased ASO-14 dose increased mitochondrial respiration in two fibroblast cell lines. The data further suggest that the ASO mediated increase in OPA1 protein expression is disease modifying in ADOA in a mutation-independent manner.

TABLE 8
Exemplary ASOs Targeting 5′ UTR of OPA1 Mature
mRNA (Organism: synthetic construct)

| | | Coordinates: | |
|---|---|---|---|
| | SEQ | GRCh38/hg38: chr3 | |
| 16-mers | ID NO | Oligo Start | Oligo End |
| TCTAGGCGGGCAGCAC | 608 | 193593143 | 193593159 |
| TTCTAGGCGGGCAGCA | 609 | 193593144 | 193593160 |
| TTTCTAGGCGGGCAGC | 610 | 193593145 | 193593161 |
| CTTTCTAGGCGGGCAG | 611 | 193593146 | 193593162 |
| CCTTTCTAGGCGGGCA | 612 | 193593147 | 193593163 |
| CCCTTTCTAGGCGGGC | 613 | 193593148 | 193593164 |
| ACCCTTTCTAGGCGGG | 614 | 193593149 | 193593165 |
| CACCCTTTCTAGGCGG | 615 | 193593150 | 193593166 |
| TCACCCTTTCTAGGCG | 616 | 193593151 | 193593167 |
| TTCACCCTTTCTAGGC | 617 | 193593152 | 193593168 |
| CTTCACCCTTTCTAGG | 618 | 193593153 | 193593169 |
| ACTTCACCCTTTCTAG | 619 | 193593154 | 193593170 |
| CACTTCACCCTTTCTA | 620 | 193593155 | 193593171 |
| CCACTTCACCCTTTCT | 621 | 193593156 | 193593172 |
| ACCACTTCACCCTTTC | 622 | 193593157 | 193593173 |
| AACCACTTCACCCTTT | 623 | 193593158 | 193593174 |
| CAACCACTTCACCCTT | 624 | 193593159 | 193593175 |
| ACAACCACTTCACCCT | 625 | 193593160 | 193593176 |
| AACAACCACTTCACCC | 626 | 193593161 | 193593177 |
| AAACAACCACTTCACC | 627 | 193593162 | 193593178 |
| GAAACAACCACTTCAC | 628 | 193593163 | 193593179 |
| GGAAACAACCACTTCA | 629 | 193593164 | 193593180 |
| CGGAAACAACCACTTC | 630 | 193593165 | 193593181 |
| ACGGAAACAACCACTT | 631 | 193593166 | 193593182 |
| CACGGAAACAACCACT | 632 | 193593167 | 193593183 |
| TCACGGAAACAACCAC | 633 | 193593168 | 193593184 |
| GTCACGGAAACAACCA | 634 | 193593169 | 193593185 |
| CGTCACGGAAACAACC | 635 | 193593170 | 193593186 |
| CCGTCACGGAAACAAC | 636 | 193593171 | 193593187 |
| TCCGTCACGGAAACAA | 637 | 193593172 | 193593188 |
| GTCCGTCACGGAAACA | 638 | 193593173 | 193593189 |
| AGTCCGTCACGGAAAC | 639 | 193593174 | 193593190 |
| CAGTCCGTCACGGAAA | 640 | 193593175 | 193593191 |
| TCAGTCCGTCACGGAA | 641 | 193593176 | 193593192 |
| CTCAGTCCGTCACGGA | 642 | 193593177 | 193593193 |
| ACTCAGTCCGTCACGG | 643 | 193593178 | 193593194 |
| TACTCAGTCCGTCACG | 644 | 193593179 | 193593195 |
| GTACTCAGTCCGTCAC | 645 | 193593180 | 193593196 |
| CGTACTCAGTCCGTCA | 646 | 193593181 | 193593197 |
| CCGTACTCAGTCCGTC | 647 | 193593182 | 193593198 |
| CCCGTACTCAGTCCGT | 648 | 193593183 | 193593199 |
| ACCCGTACTCAGTCCG | 649 | 193593184 | 193593200 |
| CACCCGTACTCAGTCC | 650 | 193593185 | 193593201 |
| GCACCCGTACTCAGTC | 651 | 193593186 | 193593202 |
| GGCACCCGTACTCAGT | 652 | 193593187 | 193593203 |
| AGGCACCCGTACTCAG | 653 | 193593188 | 193593204 |
| CAGGCACCCGTACTCA | 654 | 193593189 | 193593205 |
| ACAGGCACCCGTACTC | 655 | 193593190 | 193593206 |
| GACAGGCACCCGTACT | 656 | 193593191 | 193593207 |
| TGACAGGCACCCGTAC | 657 | 193593192 | 193593208 |
| CTGACAGGCACCCGTA | 658 | 193593193 | 193593209 |
| CCTGACAGGCACCCGT | 659 | 193593194 | 193593210 |
| GCCTGACAGGCACCCG | 660 | 193593195 | 193593211 |
| AGCCTGACAGGCACCC | 661 | 193593196 | 193593212 |
| GAGCCTGACAGGCACC | 662 | 193593197 | 193593213 |
| AGAGCCTGACAGGCAC | 663 | 193593198 | 193593214 |
| AAGAGCCTGACAGGCA | 664 | 193593199 | 193593215 |
| CAAGAGCCTGACAGGC | 665 | 193593200 | 193593216 |
| GCAAGAGCCTGACAGG | 666 | 193593201 | 193593217 |
| CGCAAGAGCCTGACAG | 667 | 193593202 | 193593218 |
| CCGCAAGAGCCTGACA | 668 | 193593203 | 193593219 |
| TCCGCAAGAGCCTGAC | 669 | 193593204 | 193593220 |
| TTCCGCAAGAGCCTGA | 670 | 193593205 | 193593221 |
| CTTCCGCAAGAGCCTG | 671 | 193593206 | 193593222 |
| ACTTCCGCAAGAGCCT | 672 | 193593207 | 193593223 |
| GACTTCCGCAAGAGCC | 673 | 193593208 | 193593224 |
| GGACTTCCGCAAGAGC | 674 | 193593209 | 193593225 |
| TGGACTTCCGCAAGAG | 675 | 193593210 | 193593226 |
| ATGGACTTCCGCAAGA | 676 | 193593211 | 193593227 |
| CATGGACTTCCGCAAG | 677 | 193593212 | 193593228 |
| GCATGGACTTCCGCAA | 678 | 193593213 | 193593229 |
| CGCATGGACTTCCGCA | 679 | 193593214 | 193593230 |
| GCGCATGGACTTCCGC | 680 | 193593215 | 193593231 |
| GGCGCATGGACTTCCG | 681 | 193593216 | 193593232 |
| TGGCGCATGGACTTCC | 682 | 193593217 | 193593233 |
| ATGGCGCATGGACTTC | 683 | 193593218 | 193593234 |
| AATGGCGCATGGACTT | 684 | 193593219 | 193593235 |
| CAATGGCGCATGGACT | 685 | 193593220 | 193593236 |
| CCAATGGCGCATGGAC | 686 | 193593221 | 193593237 |
| CCCAATGGCGCATGGA | 687 | 193593222 | 193593238 |
| TCCCAATGGCGCATGG | 688 | 193593223 | 193593239 |
| CTCCCAATGGCGCATG | 689 | 193593224 | 193593240 |
| CCTCCCAATGGCGCAT | 690 | 193593225 | 193593241 |
| CCCTCCCAATGGCGCA | 691 | 193593226 | 193593242 |
| GCCCTCCCAATGGCGC | 692 | 193593227 | 193593243 |
| GGCCCTCCCAATGGCG | 693 | 193593228 | 193593244 |
| AGGCCCTCCCAATGGC | 694 | 193593229 | 193593245 |
| GAGGCCCTCCCAATGG | 695 | 193593230 | 193593246 |
| CGAGGCCCTCCCAATG | 696 | 193593231 | 193593247 |
| CCGAGGCCCTCCCAAT | 697 | 193593232 | 193593248 |
| GCCGAGGCCCTCCCAA | 698 | 193593233 | 193593249 |
| GGCCGAGGCCCTCCCA | 699 | 193593234 | 193593250 |
| CGGCCGAGGCCCTCCC | 700 | 193593235 | 193593251 |
| GCGGCCGAGGCCCTCC | 701 | 193593236 | 193593252 |
| CGCGGCCGAGGCCCTC | 702 | 193593237 | 193593253 |
| CCGCGGCCGAGGCCCT | 703 | 193593238 | 193593254 |
| GCCGCGGCCGAGGCCC | 704 | 193593239 | 193593255 |
| AGCCGCGGCCGAGGCC | 705 | 193593240 | 193593256 |
| GAGCCGCGGCCGAGGC | 706 | 193593241 | 193593257 |
| AGAGCCGCGGCCGAGG | 707 | 193593242 | 193593258 |
| CAGAGCCGCGGCCGAG | 708 | 193593243 | 193593259 |
| ACAGAGCCGCGGCCGA | 709 | 193593244 | 193593260 |
| CACAGAGCCGCGGCCG | 710 | 193593245 | 193593261 |
| GCACAGAGCCGCGGCC | 711 | 193593246 | 193593262 |
| GGCACAGAGCCGCGGC | 712 | 193593247 | 193593263 |
| GGGCACAGAGCCGCGG | 713 | 193593248 | 193593264 |
| AGGGCACAGAGCCGCG | 714 | 193593249 | 193593265 |
| AAGGGCACAGAGCCGC | 715 | 193593250 | 193593266 |
| CAAGGGCACAGAGCCG | 716 | 193593251 | 193593267 |
| GCAAGGGCACAGAGCC | 717 | 193593252 | 193593268 |
| AGCAAGGGCACAGAGC | 718 | 193593253 | 193593269 |
| CAGCAAGGGCACAGAG | 719 | 193593254 | 193593270 |
| GCAGCAAGGGCACAGA | 720 | 193593255 | 193593271 |
| AGCAGCAAGGGCACAG | 721 | 193593256 | 193593272 |
| CAGCAGCAAGGGCACA | 722 | 193593257 | 193593273 |
| TCAGCAGCAAGGGCAC | 723 | 193593258 | 193593274 |
| CTCAGCAGCAAGGGCA | 724 | 193593259 | 193593275 |
| CCTCAGCAGCAAGGGC | 725 | 193593260 | 193593276 |
| CCCTCAGCAGCAAGGG | 726 | 193593261 | 193593277 |
| GCCCTCAGCAGCAAGG | 727 | 193593262 | 193593278 |
| GGCCCTCAGCAGCAAG | 728 | 193593263 | 193593279 |
| TGGCCCTCAGCAGCAA | 729 | 193593264 | 193593280 |
| GTGGCCCTCAGCAGCA | 730 | 193593265 | 193593281 |
| AGTGGCCCTCAGCAGC | 731 | 193593266 | 193593282 |
| AAGTGGCCCTCAGCAG | 732 | 193593267 | 193593283 |
| GAAGTGGCCCTCAGCA | 733 | 193593268 | 193593284 |
| GGAAGTGGCCCTCAGC | 734 | 193593269 | 193593285 |
| AGGAAGTGGCCCTCAG | 735 | 193593270 | 193593286 |
| CAGGAAGTGGCCCTCA | 736 | 193593271 | 193593287 |
| CCAGGAAGTGGCCCTC | 737 | 193593272 | 193593288 |
| CCCAGGAAGTGGCCCT | 738 | 193593273 | 193593289 |
| ACCCAGGAAGTGGCCC | 739 | 193593274 | 193593290 |
| GACCCAGGAAGTGGCC | 740 | 193593275 | 193593291 |
| TGACCCAGGAAGTGGC | 741 | 193593276 | 193593292 |
| ATGACCCAGGAAGTGG | 742 | 193593277 | 193593293 |
| AATGACCCAGGAAGTG | 743 | 193593278 | 193593294 |
| GAATGACCCAGGAAGT | 744 | 193593279 | 193593295 |
| GGAATGACCCAGGAAG | 745 | 193593280 | 193593296 |
| AGGAATGACCCAGGAA | 746 | 193593281 | 193593297 |
| CAGGAATGACCCAGGA | 747 | 193593282 | 193593298 |
| CCAGGAATGACCCAGG | 748 | 193593283 | 193593299 |
| TCCAGGAATGACCCAG | 749 | 193593284 | 193593300 |
| GTCCAGGAATGACCCA | 750 | 193593285 | 193593301 |
| GGTCCAGGAATGACCC | 751 | 193593286 | 193593302 |
| CGGTCCAGGAATGACC | 752 | 193593287 | 193593303 |
| CCGGTCCAGGAATGAC | 753 | 193593288 | 193593304 |
| CCCGGTCCAGGAATGA | 754 | 193593289 | 193593305 |
| TCCCGGTCCAGGAATG | 755 | 193593290 | 193593306 |
| CTCCCGGTCCAGGAAT | 756 | 193593291 | 193593307 |
| GCTCCCGGTCCAGGAA | 757 | 193593292 | 193593308 |
| GGCTCCCGGTCCAGGA | 758 | 193593293 | 193593309 |
| CGGCTCCCGGTCCAGG | 759 | 193593294 | 193593310 |
| CCGGCTCCCGGTCCAG | 760 | 193593295 | 193593311 |
| CCCGGCTCCCGGTCCA | 761 | 193593296 | 193593312 |
| GCCCGGCTCCCGGTCC | 762 | 193593297 | 193593313 |
| AGCCCGGCTCCCGGTC | 763 | 193593298 | 193593314 |
| CAGCCCGGCTCCCGGT | 764 | 193593299 | 193593315 |
| CCAGCCCGGCTCCCGG | 765 | 193593300 | 193593316 |
| CCCAGCCCGGCTCCCG | 766 | 193593301 | 193593317 |
| CCCCAGCCCGGCTCCC | 767 | 193593302 | 193593318 |
| GCCCCAGCCCGGCTCC | 768 | 193593303 | 193593319 |
| AGCCCCAGCCCGGCTC | 769 | 193593304 | 193593320 |
| GAGCCCCAGCCCGGCT | 770 | 193593305 | 193593321 |
| TGAGCCCCAGCCCGGC | 771 | 193593306 | 193593322 |
| GTGAGCCCCAGCCCGG | 772 | 193593307 | 193593323 |
| TGTGAGCCCCAGCCCG | 773 | 193593308 | 193593324 |
| GTGTGAGCCCCAGCCC | 774 | 193593309 | 193593325 |
| CGTGTGAGCCCCAGCC | 775 | 193593310 | 193593326 |
| CCGTGTGAGCCCCAGC | 776 | 193593311 | 193593327 |
| CCCGTGTGAGCCCCAG | 777 | 193593312 | 193593328 |
| CCCCGTGTGAGCCCCA | 778 | 193593313 | 193593329 |
| CCCCCGTGTGAGCCCC | 779 | 193593314 | 193593330 |
| GCCCCCGTGTGAGCCC | 780 | 193593315 | 193593331 |
| AGCCCCCGTGTGAGCC | 781 | 193593316 | 193593332 |
| GAGCCCCCGTGTGAGC | 782 | 193593317 | 193593333 |
| GGAGCCCCCGTGTGAG | 783 | 193593318 | 193593334 |
| GGGAGCCCCCGTGTGA | 784 | 193593319 | 193593335 |
| CGGGAGCCCCCGTGTG | 785 | 193593320 | 193593336 |
| GCGGGAGCCCCCGTGT | 786 | 193593321 | 193593337 |
| CGCGGGAGCCCCCGTG | 787 | 193593322 | 193593338 |
| ACGCGGGAGCCCCCGT | 788 | 193593323 | 193593339 |
| CACGCGGGAGCCCCCG | 789 | 193593324 | 193593340 |
| CCACGCGGGAGCCCCC | 790 | 193593325 | 193593341 |
| GCCACGCGGGAGCCCC | 791 | 193593326 | 193593342 |
| GGCCACGCGGGAGCCC | 792 | 193593327 | 193593343 |
| CGGCCACGCGGGAGCC | 793 | 193593328 | 193593344 |
| ACGGCCACGCGGGAGC | 794 | 193593329 | 193593345 |
| GACGGCCACGCGGGAG | 795 | 193593330 | 193593346 |
| AGACGGCCACGCGGGA | 796 | 193593331 | 193593347 |
| GAGACGGCCACGCGGG | 797 | 193593332 | 193593348 |
| CGAGACGGCCACGCGG | 798 | 193593333 | 193593349 |
| CCGAGACGGCCACGCG | 799 | 193593334 | 193593350 |
| GCCGAGACGGCCACGC | 800 | 193593335 | 193593351 |
| CGCCGAGACGGCCACG | 801 | 193593336 | 193593352 |
| GCGCCGAGACGGCCAC | 802 | 193593337 | 193593353 |
| GGCGCCGAGACGGCCA | 803 | 193593338 | 193593354 |
| AGGCGCCGAGACGGCC | 804 | 193593339 | 193593355 |
| CAGGCGCCGAGACGGC | 805 | 193593340 | 193593356 |
| GCAGGCGCCGAGACGG | 806 | 193593341 | 193593357 |
| CGCAGGCGCCGAGACG | 807 | 193593342 | 193593358 |
| ACGCAGGCGCCGAGAC | 808 | 193593343 | 193593359 |
| CACGCAGGCGCCGAGA | 809 | 193593344 | 193593360 |
| TCACGCAGGCGCCGAG | 810 | 193593345 | 193593361 |
| GTCACGCAGGCGCCGA | 811 | 193593346 | 193593362 |
| GGTCACGCAGGCGCCG | 812 | 193593347 | 193593363 |
| AGGTCACGCAGGCGCC | 813 | 193593348 | 193593364 |
| GAGGTCACGCAGGCGC | 814 | 193593349 | 193593365 |
| GGAGGTCACGCAGGCG | 815 | 193593350 | 193593366 |
| GGGAGGTCACGCAGGC | 816 | 193593351 | 193593367 |
| GGGGAGGTCACGCAGG | 817 | 193593352 | 193593368 |
| CGGGGAGGTCACGCAG | 818 | 193593353 | 193593369 |
| GCGGGGAGGTCACGCA | 819 | 193593354 | 193593370 |
| GGCGGGGAGGTCACGC | 820 | 193593355 | 193593371 |
| CGGCGGGGAGGTCACG | 821 | 193593356 | 193593372 |
| CCGGCGGGGAGGTCAC | 822 | 193593357 | 193593373 |
| GCCGGCGGGGAGGTCA | 823 | 193593358 | 193593374 |
| CGCCGGCGGGGAGGTC | 824 | 193593359 | 193593375 |
| CCGCCGGCGGGGAGGT | 825 | 193593360 | 193593376 |
| CCCGCCGGCGGGGAGG | 826 | 193593361 | 193593377 |
| | | Coordinates: | |
| | SEQ | GRCh38/hg38: chr3 | |
| 18-mers | ID NO | Oligo Start | Oligo End |
| TTTCTAGGCGGGCAGCAC | 827 | 193593143 | 193593161 |
| CTTTCTAGGCGGGCAGCA | 828 | 193593144 | 193593162 |
| CCTTTCTAGGCGGGCAGC | 829 | 193593145 | 193593163 |
| CCCTTTCTAGGCGGGCAG | 830 | 193593146 | 193593164 |
| ACCCTTTCTAGGCGGGCA | 831 | 193593147 | 193593165 |
| CACCCTTTCTAGGCGGGC | 832 | 193593148 | 193593166 |
| TCACCCTTTCTAGGCGGG | 833 | 193593149 | 193593167 |
| TTCACCCTTTCTAGGCGG | 834 | 193593150 | 193593168 |
| CTTCACCCTTTCTAGGCG | 835 | 193593151 | 193593169 |
| ACTTCACCCTTTCTAGGC | 836 | 193593152 | 193593170 |
| CACTTCACCCTTTCTAGG | 837 | 193593153 | 193593171 |
| CCACTTCACCCTTTCTAG | 838 | 193593154 | 193593172 |
| ACCACTTCACCCTTTCTA | 839 | 193593155 | 193593173 |
| AACCACTTCACCCTTTCT | 840 | 193593156 | 193593174 |
| CAACCACTTCACCCTTTC | 841 | 193593157 | 193593175 |
| ACAACCACTTCACCCTTT | 842 | 193593158 | 193593176 |
| AACAACCACTTCACCCTT | 843 | 193593159 | 193593177 |
| AAACAACCACTTCACCCT | 844 | 193593160 | 193593178 |
| GAAACAACCACTTCACCC | 845 | 193593161 | 193593179 |
| GGAAACAACCACTTCACC | 846 | 193593162 | 193593180 |
| CGGAAACAACCACTTCAC | 847 | 193593163 | 193593181 |
| ACGGAAACAACCACTTCA | 848 | 193593164 | 193593182 |
| CACGGAAACAACCACTTC | 849 | 193593165 | 193593183 |
| TCACGGAAACAACCACTT | 850 | 193593166 | 193593184 |
| GTCACGGAAACAACCACT | 851 | 193593167 | 193593185 |
| CGTCACGGAAACAACCAC | 852 | 193593168 | 193593186 |
| CCGTCACGGAAACAACCA | 853 | 193593169 | 193593187 |
| TCCGTCACGGAAACAACC | 854 | 193593170 | 193593188 |
| GTCCGTCACGGAAACAAC | 855 | 193593171 | 193593189 |
| AGTCCGTCACGGAAACAA | 856 | 193593172 | 193593190 |
| CAGTCCGTCACGGAAACA | 857 | 193593173 | 193593191 |
| TCAGTCCGTCACGGAAAC | 858 | 193593174 | 193593192 |
| CTCAGTCCGTCACGGAAA | 859 | 193593175 | 193593193 |
| ACTCAGTCCGTCACGGAA | 860 | 193593176 | 193593194 |
| TACTCAGTCCGTCACGGA | 861 | 193593177 | 193593195 |
| GTACTCAGTCCGTCACGG | 862 | 193593178 | 193593196 |
| CGTACTCAGTCCGTCACG | 863 | 193593179 | 193593197 |
| CCGTACTCAGTCCGTCAC | 864 | 193593180 | 193593198 |
| CCCGTACTCAGTCCGTCA | 865 | 193593181 | 193593199 |
| ACCCGTACTCAGTCCGTC | 866 | 193593182 | 193593200 |
| CACCCGTACTCAGTCCGT | 867 | 193593183 | 193593201 |
| GCACCCGTACTCAGTCCG | 868 | 193593184 | 193593202 |
| GGCACCCGTACTCAGTCC | 869 | 193593185 | 193593203 |
| AGGCACCCGTACTCAGTC | 870 | 193593186 | 193593204 |
| CAGGCACCCGTACTCAGT | 871 | 193593187 | 193593205 |
| ACAGGCACCCGTACTCAG | 872 | 193593188 | 193593206 |
| GACAGGCACCCGTACTCA | 873 | 193593189 | 193593207 |
| TGACAGGCACCCGTACTC | 874 | 193593190 | 193593208 |
| CTGACAGGCACCCGTACT | 875 | 193593191 | 193593209 |
| CCTGACAGGCACCCGTAC | 876 | 193593192 | 193593210 |
| GCCTGACAGGCACCCGTA | 877 | 193593193 | 193593211 |
| AGCCTGACAGGCACCCGT | 878 | 193593194 | 193593212 |
| GAGCCTGACAGGCACCCG | 879 | 193593195 | 193593213 |
| AGAGCCTGACAGGCACCC | 880 | 193593196 | 193593214 |
| AAGAGCCTGACAGGCACC | 881 | 193593197 | 193593215 |
| CAAGAGCCTGACAGGCAC | 882 | 193593198 | 193593216 |
| GCAAGAGCCTGACAGGCA | 883 | 193593199 | 193593217 |
| CGCAAGAGCCTGACAGGC | 884 | 193593200 | 193593218 |
| CCGCAAGAGCCTGACAGG | 885 | 193593201 | 193593219 |
| TCCGCAAGAGCCTGACAG | 886 | 193593202 | 193593220 |
| TTCCGCAAGAGCCTGACA | 887 | 193593203 | 193593221 |
| CTTCCGCAAGAGCCTGAC | 888 | 193593204 | 193593222 |
| ACTTCCGCAAGAGCCTGA | 889 | 193593205 | 193593223 |
| GACTTCCGCAAGAGCCTG | 890 | 193593206 | 193593224 |
| GGACTTCCGCAAGAGCCT | 891 | 193593207 | 193593225 |
| TGGACTTCCGCAAGAGCC | 892 | 193593208 | 193593226 |
| ATGGACTTCCGCAAGAGC | 893 | 193593209 | 193593227 |
| CATGGACTTCCGCAAGAG | 894 | 193593210 | 193593228 |
| GCATGGACTTCCGCAAGA | 895 | 193593211 | 193593229 |
| CGCATGGACTTCCGCAAG | 896 | 193593212 | 193593230 |
| GCGCATGGACTTCCGCAA | 897 | 193593213 | 193593231 |
| GGCGCATGGACTTCCGCA | 898 | 193593214 | 193593232 |
| TGGCGCATGGACTTCCGC | 899 | 193593215 | 193593233 |
| ATGGCGCATGGACTTCCG | 900 | 193593216 | 193593234 |
| AATGGCGCATGGACTTCC | 901 | 193593217 | 193593235 |
| CAATGGCGCATGGACTTC | 902 | 193593218 | 193593236 |
| CCAATGGCGCATGGACTT | 903 | 193593219 | 193593237 |
| CCCAATGGCGCATGGACT | 904 | 193593220 | 193593238 |
| TCCCAATGGCGCATGGAC | 905 | 193593221 | 193593239 |
| CTCCCAATGGCGCATGGA | 906 | 193593222 | 193593240 |
| CCTCCCAATGGCGCATGG | 907 | 193593223 | 193593241 |
| CCCTCCCAATGGCGCATG | 908 | 193593224 | 193593242 |
| GCCCTCCCAATGGCGCAT | 909 | 193593225 | 193593243 |
| GGCCCTCCCAATGGCGCA | 910 | 193593226 | 193593244 |
| AGGCCCTCCCAATGGCGC | 911 | 193593227 | 193593245 |
| GAGGCCCTCCCAATGGCG | 912 | 193593228 | 193593246 |
| CGAGGCCCTCCCAATGGC | 913 | 193593229 | 193593247 |
| CCGAGGCCCTCCCAATGG | 914 | 193593230 | 193593248 |
| GCCGAGGCCCTCCCAATG | 915 | 193593231 | 193593249 |
| GGCCGAGGCCCTCCCAAT | 916 | 193593232 | 193593250 |
| CGGCCGAGGCCCTCCCAA | 917 | 193593233 | 193593251 |
| GCGGCCGAGGCCCTCCCA | 918 | 193593234 | 193593252 |
| CGCGGCCGAGGCCCTCCC | 919 | 193593235 | 193593253 |
| CCGCGGCCGAGGCCCTCC | 920 | 193593236 | 193593254 |
| GCCGCGGCCGAGGCCCTC | 921 | 193593237 | 193593255 |
| AGCCGCGGCCGAGGCCCT | 922 | 193593238 | 193593256 |
| GAGCCGCGGCCGAGGCCC | 923 | 193593239 | 193593257 |
| AGAGCCGCGGCCGAGGCC | 924 | 193593240 | 193593258 |
| CAGAGCCGCGGCCGAGGC | 925 | 193593241 | 193593259 |
| ACAGAGCCGCGGCCGAGG | 926 | 193593242 | 193593260 |
| CACAGAGCCGCGGCCGAG | 927 | 193593243 | 193593261 |
| GCACAGAGCCGCGGCCGA | 928 | 193593244 | 193593262 |
| GGCACAGAGCCGCGGCCG | 929 | 193593245 | 193593263 |
| GGGCACAGAGCCGCGGCC | 930 | 193593246 | 193593264 |
| AGGGCACAGAGCCGCGGC | 931 | 193593247 | 193593265 |
| AAGGGCACAGAGCCGCGG | 932 | 193593248 | 193593266 |
| CAAGGGCACAGAGCCGCG | 933 | 193593249 | 193593267 |
| GCAAGGGCACAGAGCCGC | 934 | 193593250 | 193593268 |
| AGCAAGGGCACAGAGCCG | 935 | 193593251 | 193593269 |
| CAGCAAGGGCACAGAGCC | 936 | 193593252 | 193593270 |
| GCAGCAAGGGCACAGAGC | 937 | 193593253 | 193593271 |
| AGCAGCAAGGGCACAGAG | 938 | 193593254 | 193593272 |
| CAGCAGCAAGGGCACAGA | 939 | 193593255 | 193593273 |
| TCAGCAGCAAGGGCACAG | 940 | 193593256 | 193593274 |
| CTCAGCAGCAAGGGCACA | 941 | 193593257 | 193593275 |
| CCTCAGCAGCAAGGGCAC | 942 | 193593258 | 193593276 |
| CCCTCAGCAGCAAGGGCA | 943 | 193593259 | 193593277 |
| GCCCTCAGCAGCAAGGGC | 944 | 193593260 | 193593278 |
| GGCCCTCAGCAGCAAGGG | 945 | 193593261 | 193593279 |
| TGGCCCTCAGCAGCAAGG | 946 | 193593262 | 193593280 |
| GTGGCCCTCAGCAGCAAG | 947 | 193593263 | 193593281 |
| AGTGGCCCTCAGCAGCAA | 948 | 193593264 | 193593282 |
| AAGTGGCCCTCAGCAGCA | 949 | 193593265 | 193593283 |
| GAAGTGGCCCTCAGCAGC | 950 | 193593266 | 193593284 |
| GGAAGTGGCCCTCAGCAG | 951 | 193593267 | 193593285 |
| AGGAAGTGGCCCTCAGCA | 952 | 193593268 | 193593286 |
| CAGGAAGTGGCCCTCAGC | 953 | 193593269 | 193593287 |
| CCAGGAAGTGGCCCTCAG | 954 | 193593270 | 193593288 |
| CCCAGGAAGTGGCCCTCA | 955 | 193593271 | 193593289 |
| ACCCAGGAAGTGGCCCTC | 956 | 193593272 | 193593290 |
| GACCCAGGAAGTGGCCCT | 957 | 193593273 | 193593291 |
| TGACCCAGGAAGTGGCCC | 958 | 193593274 | 193593292 |
| ATGACCCAGGAAGTGGCC | 959 | 193593275 | 193593293 |
| AATGACCCAGGAAGTGGC | 960 | 193593276 | 193593294 |
| GAATGACCCAGGAAGTGG | 961 | 193593277 | 193593295 |
| GGAATGACCCAGGAAGTG | 962 | 193593278 | 193593296 |
| AGGAATGACCCAGGAAGT | 963 | 193593279 | 193593297 |
| CAGGAATGACCCAGGAAG | 964 | 193593280 | 193593298 |
| CCAGGAATGACCCAGGAA | 965 | 193593281 | 193593299 |
| TCCAGGAATGACCCAGGA | 966 | 193593282 | 193593300 |
| GTCCAGGAATGACCCAGG | 967 | 193593283 | 193593301 |
| GGTCCAGGAATGACCCAG | 968 | 193593284 | 193593302 |
| CGGTCCAGGAATGACCCA | 969 | 193593285 | 193593303 |
| CCGGTCCAGGAATGACCC | 970 | 193593286 | 193593304 |
| CCCGGTCCAGGAATGACC | 971 | 193593287 | 193593305 |
| TCCCGGTCCAGGAATGAC | 972 | 193593288 | 193593306 |
| CTCCCGGTCCAGGAATGA | 973 | 193593289 | 193593307 |
| GCTCCCGGTCCAGGAATG | 974 | 193593290 | 193593308 |
| GGCTCCCGGTCCAGGAAT | 975 | 193593291 | 193593309 |
| CGGCTCCCGGTCCAGGAA | 976 | 193593292 | 193593310 |
| CCGGCTCCCGGTCCAGGA | 977 | 193593293 | 193593311 |
| CCCGGCTCCCGGTCCAGG | 978 | 193593294 | 193593312 |
| GCCCGGCTCCCGGTCCAG | 979 | 193593295 | 193593313 |
| AGCCCGGCTCCCGGTCCA | 980 | 193593296 | 193593314 |
| CAGCCCGGCTCCCGGTCC | 981 | 193593297 | 193593315 |
| CCAGCCCGGCTCCCGGTC | 982 | 193593298 | 193593316 |
| CCCAGCCCGGCTCCCGGT | 983 | 193593299 | 193593317 |
| CCCCAGCCCGGCTCCCGG | 984 | 193593300 | 193593318 |
| GCCCCAGCCCGGCTCCCG | 985 | 193593301 | 193593319 |
| AGCCCCAGCCCGGCTCCC | 986 | 193593302 | 193593320 |
| GAGCCCCAGCCCGGCTCC | 987 | 193593303 | 193593321 |
| TGAGCCCCAGCCCGGCTC | 988 | 193593304 | 193593322 |
| GTGAGCCCCAGCCCGGCT | 989 | 193593305 | 193593323 |
| TGTGAGCCCCAGCCCGGC | 990 | 193593306 | 193593324 |
| GTGTGAGCCCCAGCCCGG | 991 | 193593307 | 193593325 |
| CGTGTGAGCCCCAGCCCG | 992 | 193593308 | 193593326 |
| CCGTGTGAGCCCCAGCCC | 993 | 193593309 | 193593327 |
| CCCGTGTGAGCCCCAGCC | 994 | 193593310 | 193593328 |
| CCCCGTGTGAGCCCCAGC | 995 | 193593311 | 193593329 |
| CCCCCGTGTGAGCCCCAG | 996 | 193593312 | 193593330 |
| GCCCCCGTGTGAGCCCCA | 997 | 193593313 | 193593331 |
| AGCCCCCGTGTGAGCCCC | 998 | 193593314 | 193593332 |
| GAGCCCCCGTGTGAGCCC | 999 | 193593315 | 193593333 |
| GGAGCCCCCGTGTGAGCC | 1000 | 193593316 | 193593334 |
| GGGAGCCCCCGTGTGAGC | 1001 | 193593317 | 193593335 |
| CGGGAGCCCCCGTGTGAG | 1002 | 193593318 | 193593336 |
| GCGGGAGCCCCCGTGTGA | 1003 | 193593319 | 193593337 |
| CGCGGGAGCCCCCGTGTG | 1004 | 193593320 | 193593338 |
| ACGCGGGAGCCCCCGTGT | 1005 | 193593321 | 193593339 |
| CACGCGGGAGCCCCCGTG | 1006 | 193593322 | 193593340 |
| CCACGCGGGAGCCCCCGT | 1007 | 193593323 | 193593341 |
| GCCACGCGGGAGCCCCCG | 1008 | 193593324 | 193593342 |
| GGCCACGCGGGAGCCCCC | 1009 | 193593325 | 193593343 |
| CGGCCACGCGGGAGCCCC | 1010 | 193593326 | 193593344 |
| ACGGCCACGCGGGAGCCC | 1011 | 193593327 | 193593345 |
| GACGGCCACGCGGGAGCC | 1012 | 193593328 | 193593346 |
| AGACGGCCACGCGGGAGC | 1013 | 193593329 | 193593347 |
| GAGACGGCCACGCGGGAG | 1014 | 193593330 | 193593348 |
| CGAGACGGCCACGCGGGA | 1015 | 193593331 | 193593349 |
| CCGAGACGGCCACGCGGG | 1016 | 193593332 | 193593350 |
| GCCGAGACGGCCACGCGG | 1017 | 193593333 | 193593351 |
| CGCCGAGACGGCCACGCG | 1018 | 193593334 | 193593352 |
| GCGCCGAGACGGCCACGC | 1019 | 193593335 | 193593353 |
| GGCGCCGAGACGGCCACG | 1020 | 193593336 | 193593354 |
| AGGCGCCGAGACGGCCAC | 1021 | 193593337 | 193593355 |
| CAGGCGCCGAGACGGCCA | 1022 | 193593338 | 193593356 |
| GCAGGCGCCGAGACGGCC | 1023 | 193593339 | 193593357 |
| CGCAGGCGCCGAGACGGC | 1024 | 193593340 | 193593358 |
| ACGCAGGCGCCGAGACGG | 1025 | 193593341 | 193593359 |
| CACGCAGGCGCCGAGACG | 1026 | 193593342 | 193593360 |
| TCACGCAGGCGCCGAGAC | 1027 | 193593343 | 193593361 |
| GTCACGCAGGCGCCGAGA | 1028 | 193593344 | 193593362 |
| GGTCACGCAGGCGCCGAG | 1029 | 193593345 | 193593363 |
| AGGTCACGCAGGCGCCGA | 1030 | 193593346 | 193593364 |
| GAGGTCACGCAGGCGCCG | 1031 | 193593347 | 193593365 |
| GGAGGTCACGCAGGCGCC | 1032 | 193593348 | 193593366 |
| GGGAGGTCACGCAGGCGC | 1033 | 193593349 | 193593367 |
| GGGGAGGTCACGCAGGCG | 1034 | 193593350 | 193593368 |
| CGGGGAGGTCACGCAGGC | 1035 | 193593351 | 193593369 |
| GCGGGGAGGTCACGCAGG | 1036 | 193593352 | 193593370 |
| GGCGGGGAGGTCACGCAG | 1037 | 193593353 | 193593371 |
| CGGCGGGGAGGTCACGCA | 1038 | 193593354 | 193593372 |
| CCGGCGGGGAGGTCACGC | 1039 | 193593355 | 193593373 |
| GCCGGCGGGGAGGTCACG | 1040 | 193593356 | 193593374 |
| CGCCGGCGGGGAGGTCAC | 1041 | 193593357 | 193593375 |
| CCGCCGGCGGGGAGGTCA | 1042 | 193593358 | 193593376 |
| CCCGCCGGCGGGGAGGTC | 1043 | 193593359 | 193593377 |
| TTCACCCTTTCTAGGCGGGCAGCAC | 1044 | 193593143 | 193593168 |
| CTTCACCCTTTCTAGGCGGGCAGCA | 1045 | 193593144 | 193593169 |
| ACTTCACCCTTTCTAGGCGGGCAGC | 1046 | 193593145 | 193593170 |
| CACTTCACCCTTTCTAGGCGGGCAG | 1047 | 193593146 | 193593171 |
| CCACTTCACCCTTTCTAGGCGGGCA | 1048 | 193593147 | 193593172 |
| ACCACTTCACCCTTTCTAGGCGGGC | 1049 | 193593148 | 193593173 |
| AACCACTTCACCCTTTCTAGGCGGG | 1050 | 193593149 | 193593174 |
| CAACCACTTCACCCTTTCTAGGCGG | 1051 | 193593150 | 193593175 |
| ACAACCACTTCACCCTTTCTAGGCG | 1052 | 193593151 | 193593176 |
| AACAACCACTTCACCCTTTCTAGGC | 1053 | 193593152 | 193593177 |
| AAACAACCACTTCACCCTTTCTAGG | 1054 | 193593153 | 193593178 |
| GAAACAACCACTTCACCCTTTCTAG | 1055 | 193593154 | 193593179 |
| GGAAACAACCACTTCACCCTTTCTA | 1056 | 193593155 | 193593180 |
| CGGAAACAACCACTTCACCCTTTCT | 1057 | 193593156 | 193593181 |
| ACGGAAACAACCACTTCACCCTTTC | 1058 | 193593157 | 193593182 |
| CACGGAAACAACCACTTCACCCTTT | 1059 | 193593158 | 193593183 |
| TCACGGAAACAACCACTTCACCCTT | 1060 | 193593159 | 193593184 |
| GTCACGGAAACAACCACTTCACCCT | 1061 | 193593160 | 193593185 |
| CGTCACGGAAACAACCACTTCACCC | 1062 | 193593161 | 193593186 |
| CCGTCACGGAAACAACCACTTCACC | 1063 | 193593162 | 193593187 |
| TCCGTCACGGAAACAACCACTTCAC | 1064 | 193593163 | 193593188 |
| GTCCGTCACGGAAACAACCACTTCA | 1065 | 193593164 | 193593189 |
| AGTCCGTCACGGAAACAACCACTTC | 1066 | 193593165 | 193593190 |
| CAGTCCGTCACGGAAACAACCACTT | 1067 | 193593166 | 193593191 |
| TCAGTCCGTCACGGAAACAACCACT | 1068 | 193593167 | 193593192 |
| CTCAGTCCGTCACGGAAACAACCAC | 1069 | 193593168 | 193593193 |
| ACTCAGTCCGTCACGGAAACAACCA | 1070 | 193593169 | 193593194 |
| TACTCAGTCCGTCACGGAAACAACC | 1071 | 193593170 | 193593195 |
| GTACTCAGTCCGTCACGGAAACAAC | 1072 | 193593171 | 193593196 |
| CGTACTCAGTCCGTCACGGAAACAA | 1073 | 193593172 | 193593197 |
| CCGTACTCAGTCCGTCACGGAAACA | 1074 | 193593173 | 193593198 |
| CCCGTACTCAGTCCGTCACGGAAAC | 1075 | 193593174 | 193593199 |
| ACCCGTACTCAGTCCGTCACGGAAA | 1076 | 193593175 | 193593200 |
| CACCCGTACTCAGTCCGTCACGGAA | 1077 | 193593176 | 193593201 |
| GCACCCGTACTCAGTCCGTCACGGA | 1078 | 193593177 | 193593202 |
| GGCACCCGTACTCAGTCCGTCACGG | 1079 | 193593178 | 193593203 |
| AGGCACCCGTACTCAGTCCGTCACG | 1080 | 193593179 | 193593204 |
| CAGGCACCCGTACTCAGTCCGTCAC | 1081 | 193593180 | 193593205 |
| ACAGGCACCCGTACTCAGTCCGTCA | 1082 | 193593181 | 193593206 |
| GACAGGCACCCGTACTCAGTCCGTC | 1083 | 193593182 | 193593207 |
| TGACAGGCACCCGTACTCAGTCCGT | 1084 | 193593183 | 193593208 |
| CTGACAGGCACCCGTACTCAGTCCG | 1085 | 193593184 | 193593209 |
| CCTGACAGGCACCCGTACTCAGTCC | 1086 | 193593185 | 193593210 |
| GCCTGACAGGCACCCGTACTCAGTC | 1087 | 193593186 | 193593211 |
| AGCCTGACAGGCACCCGTACTCAGT | 1088 | 193593187 | 193593212 |
| GAGCCTGACAGGCACCCGTACTCAG | 1089 | 193593188 | 193593213 |
| AGAGCCTGACAGGCACCCGTACTCA | 1090 | 193593189 | 193593214 |
| AAGAGCCTGACAGGCACCCGTACTC | 1091 | 193593190 | 193593215 |
| CAAGAGCCTGACAGGCACCCGTACT | 1092 | 193593191 | 193593216 |
| GCAAGAGCCTGACAGGCACCCGTAC | 1093 | 193593192 | 193593217 |
| CGCAAGAGCCTGACAGGCACCCGTA | 1094 | 193593193 | 193593218 |
| CCGCAAGAGCCTGACAGGCACCCGT | 1095 | 193593194 | 193593219 |
| TCCGCAAGAGCCTGACAGGCACCCG | 1096 | 193593195 | 193593220 |
| TTCCGCAAGAGCCTGACAGGCACCC | 1097 | 193593196 | 193593221 |
| CTTCCGCAAGAGCCTGACAGGCACC | 1098 | 193593197 | 193593222 |
| ACTTCCGCAAGAGCCTGACAGGCAC | 1099 | 193593198 | 193593223 |
| GACTTCCGCAAGAGCCTGACAGGCA | 1100 | 193593199 | 193593224 |
| GGACTTCCGCAAGAGCCTGACAGGC | 1101 | 193593200 | 193593225 |
| TGGACTTCCGCAAGAGCCTGACAGG | 1102 | 193593201 | 193593226 |
| ATGGACTTCCGCAAGAGCCTGACAG | 1103 | 193593202 | 193593227 |
| CATGGACTTCCGCAAGAGCCTGACA | 1104 | 193593203 | 193593228 |
| GCATGGACTTCCGCAAGAGCCTGAC | 1105 | 193593204 | 193593229 |
| CGCATGGACTTCCGCAAGAGCCTGA | 1106 | 193593205 | 193593230 |
| GCGCATGGACTTCCGCAAGAGCCTG | 1107 | 193593206 | 193593231 |
| GGCGCATGGACTTCCGCAAGAGCCT | 1108 | 193593207 | 193593232 |
| TGGCGCATGGACTTCCGCAAGAGCC | 1109 | 193593208 | 193593233 |
| ATGGCGCATGGACTTCCGCAAGAGC | 1110 | 193593209 | 193593234 |
| AATGGCGCATGGACTTCCGCAAGAG | 1111 | 193593210 | 193593235 |
| CAATGGCGCATGGACTTCCGCAAGA | 1112 | 193593211 | 193593236 |
| CCAATGGCGCATGGACTTCCGCAAG | 1113 | 193593212 | 193593237 |
| CCCAATGGCGCATGGACTTCCGCAA | 1114 | 193593213 | 193593238 |
| TCCCAATGGCGCATGGACTTCCGCA | 1115 | 193593214 | 193593239 |
| CTCCCAATGGCGCATGGACTTCCGC | 1116 | 193593215 | 193593240 |
| CCTCCCAATGGCGCATGGACTTCCG | 1117 | 193593216 | 193593241 |
| CCCTCCCAATGGCGCATGGACTTCC | 1118 | 193593217 | 193593242 |
| GCCCTCCCAATGGCGCATGGACTTC | 1119 | 193593218 | 193593243 |
| GGCCCTCCCAATGGCGCATGGACTT | 1120 | 193593219 | 193593244 |
| AGGCCCTCCCAATGGCGCATGGACT | 1121 | 193593220 | 193593245 |
| GAGGCCCTCCCAATGGCGCATGGAC | 1122 | 193593221 | 193593246 |
| CGAGGCCCTCCCAATGGCGCATGGA | 1123 | 193593222 | 193593247 |
| CCGAGGCCCTCCCAATGGCGCATGG | 1124 | 193593223 | 193593248 |
| GCCGAGGCCCTCCCAATGGCGCATG | 1125 | 193593224 | 193593249 |
| GGCCGAGGCCCTCCCAATGGCGCAT | 1126 | 193593225 | 193593250 |
| CGGCCGAGGCCCTCCCAATGGCGCA | 1127 | 193593226 | 193593251 |
| GCGGCCGAGGCCCTCCCAATGGCGC | 1128 | 193593227 | 193593252 |
| CGCGGCCGAGGCCCTCCCAATGGCG | 1129 | 193593228 | 193593253 |
| CCGCGGCCGAGGCCCTCCCAATGGC | 1130 | 193593229 | 193593254 |
| GCCGCGGCCGAGGCCCTCCCAATGG | 1131 | 193593230 | 193593255 |
| AGCCGCGGCCGAGGCCCTCCCAATG | 1132 | 193593231 | 193593256 |
| GAGCCGCGGCCGAGGCCCTCCCAAT | 1133 | 193593232 | 193593257 |
| AGAGCCGCGGCCGAGGCCCTCCCAA | 1134 | 193593233 | 193593258 |
| CAGAGCCGCGGCCGAGGCCCTCCCA | 1135 | 193593234 | 193593259 |
| ACAGAGCCGCGGCCGAGGCCCTCCC | 1136 | 193593235 | 193593260 |
| CACAGAGCCGCGGCCGAGGCCCTCC | 1137 | 193593236 | 193593261 |
| GCACAGAGCCGCGGCCGAGGCCCTC | 1138 | 193593237 | 193593262 |
| GGCACAGAGCCGCGGCCGAGGCCCT | 1139 | 193593238 | 193593263 |
| GGGCACAGAGCCGCGGCCGAGGCCC | 1140 | 193593239 | 193593264 |
| AGGGCACAGAGCCGCGGCCGAGGCC | 1141 | 193593240 | 193593265 |
| AAGGGCACAGAGCCGCGGCCGAGGC | 1142 | 193593241 | 193593266 |
| CAAGGGCACAGAGCCGCGGCCGAGG | 1143 | 193593242 | 193593267 |
| GCAAGGGCACAGAGCCGCGGCCGAG | 1144 | 193593243 | 193593268 |
| AGCAAGGGCACAGAGCCGCGGCCGA | 1145 | 193593244 | 193593269 |
| CAGCAAGGGCACAGAGCCGCGGCCG | 1146 | 193593245 | 193593270 |
| GCAGCAAGGGCACAGAGCCGCGGCC | 1147 | 193593246 | 193593271 |
| AGCAGCAAGGGCACAGAGCCGCGGC | 1148 | 193593247 | 193593272 |
| CAGCAGCAAGGGCACAGAGCCGCGG | 1149 | 193593248 | 193593273 |
| TCAGCAGCAAGGGCACAGAGCCGCG | 1150 | 193593249 | 193593274 |
| CTCAGCAGCAAGGGCACAGAGCCGC | 1151 | 193593250 | 193593275 |
| CCTCAGCAGCAAGGGCACAGAGCCG | 1152 | 193593251 | 193593276 |
| CCCTCAGCAGCAAGGGCACAGAGCC | 1153 | 193593252 | 193593277 |
| GCCCTCAGCAGCAAGGGCACAGAGC | 1154 | 193593253 | 193593278 |
| GGCCCTCAGCAGCAAGGGCACAGAG | 1155 | 193593254 | 193593279 |
| TGGCCCTCAGCAGCAAGGGCACAGA | 1156 | 193593255 | 193593280 |
| GTGGCCCTCAGCAGCAAGGGCACAG | 1157 | 193593256 | 193593281 |
| AGTGGCCCTCAGCAGCAAGGGCACA | 1158 | 193593257 | 193593282 |
| AAGTGGCCCTCAGCAGCAAGGGCAC | 1159 | 193593258 | 193593283 |
| GAAGTGGCCCTCAGCAGCAAGGGCA | 1160 | 193593259 | 193593284 |
| GGAAGTGGCCCTCAGCAGCAAGGGC | 1161 | 193593260 | 193593285 |
| AGGAAGTGGCCCTCAGCAGCAAGGG | 1162 | 193593261 | 193593286 |
| CAGGAAGTGGCCCTCAGCAGCAAGG | 1163 | 193593262 | 193593287 |
| CCAGGAAGTGGCCCTCAGCAGCAAG | 1164 | 193593263 | 193593288 |
| CCCAGGAAGTGGCCCTCAGCAGCAA | 1165 | 193593264 | 193593289 |
| ACCCAGGAAGTGGCCCTCAGCAGCA | 1166 | 193593265 | 193593290 |
| GACCCAGGAAGTGGCCCTCAGCAGC | 1167 | 193593266 | 193593291 |
| TGACCCAGGAAGTGGCCCTCAGCAG | 1168 | 193593267 | 193593292 |
| ATGACCCAGGAAGTGGCCCTCAGCA | 1169 | 193593268 | 193593293 |
| AATGACCCAGGAAGTGGCCCTCAGC | 1170 | 193593269 | 193593294 |
| GAATGACCCAGGAAGTGGCCCTCAG | 1171 | 193593270 | 193593295 |
| GGAATGACCCAGGAAGTGGCCCTCA | 1172 | 193593271 | 193593296 |
| AGGAATGACCCAGGAAGTGGCCCTC | 1173 | 193593272 | 193593297 |
| CAGGAATGACCCAGGAAGTGGCCCT | 1174 | 193593273 | 193593298 |
| CCAGGAATGACCCAGGAAGTGGCCC | 1175 | 193593274 | 193593299 |
| TCCAGGAATGACCCAGGAAGTGGCC | 1176 | 193593275 | 193593300 |
| GTCCAGGAATGACCCAGGAAGTGGC | 1177 | 193593276 | 193593301 |
| GGTCCAGGAATGACCCAGGAAGTGG | 1178 | 193593277 | 193593302 |
| CGGTCCAGGAATGACCCAGGAAGTG | 1179 | 193593278 | 193593303 |
| CCGGTCCAGGAATGACCCAGGAAGT | 1180 | 193593279 | 193593304 |
| CCCGGTCCAGGAATGACCCAGGAAG | 1181 | 193593280 | 193593305 |
| TCCCGGTCCAGGAATGACCCAGGAA | 1182 | 193593281 | 193593306 |
| CTCCCGGTCCAGGAATGACCCAGGA | 1183 | 193593282 | 193593307 |
| GCTCCCGGTCCAGGAATGACCCAGG | 1184 | 193593283 | 193593308 |
| GGCTCCCGGTCCAGGAATGACCCAG | 1185 | 193593284 | 193593309 |
| CGGCTCCCGGTCCAGGAATGACCCA | 1186 | 193593285 | 193593310 |
| CCGGCTCCCGGTCCAGGAATGACCC | 1187 | 193593286 | 193593311 |
| CCCGGCTCCCGGTCCAGGAATGACC | 1188 | 193593287 | 193593312 |
| GCCCGGCTCCCGGTCCAGGAATGAC | 1189 | 193593288 | 193593313 |
| AGCCCGGCTCCCGGTCCAGGAATGA | 1190 | 193593289 | 193593314 |
| CAGCCCGGCTCCCGGTCCAGGAATG | 1191 | 193593290 | 193593315 |
| CCAGCCCGGCTCCCGGTCCAGGAAT | 1192 | 193593291 | 193593316 |
| CCCAGCCCGGCTCCCGGTCCAGGAA | 1193 | 193593292 | 193593317 |
| CCCCAGCCCGGCTCCCGGTCCAGGA | 1194 | 193593293 | 193593318 |
| GCCCCAGCCCGGCTCCCGGTCCAGG | 1195 | 193593294 | 193593319 |
| AGCCCCAGCCCGGCTCCCGGTCCAG | 1196 | 193593295 | 193593320 |
| GAGCCCCAGCCCGGCTCCCGGTCCA | 1197 | 193593296 | 193593321 |
| TGAGCCCCAGCCCGGCTCCCGGTCC | 1198 | 193593297 | 193593322 |
| GTGAGCCCCAGCCCGGCTCCCGGTC | 1199 | 193593298 | 193593323 |
| TGTGAGCCCCAGCCCGGCTCCCGGT | 1200 | 193593299 | 193593324 |
| GTGTGAGCCCCAGCCCGGCTCCCGG | 1201 | 193593300 | 193593325 |
| CGTGTGAGCCCCAGCCCGGCTCCCG | 1202 | 193593301 | 193593326 |
| CCGTGTGAGCCCCAGCCCGGCTCCC | 1203 | 193593302 | 193593327 |
| CCCGTGTGAGCCCCAGCCCGGCTCC | 1204 | 193593303 | 193593328 |
| CCCCGTGTGAGCCCCAGCCCGGCTC | 1205 | 193593304 | 193593329 |
| CCCCCGTGTGAGCCCCAGCCCGGCT | 1206 | 193593305 | 193593330 |
| GCCCCCGTGTGAGCCCCAGCCCGGC | 1207 | 193593306 | 193593331 |
| AGCCCCCGTGTGAGCCCCAGCCCGG | 1208 | 193593307 | 193593332 |
| GAGCCCCCGTGTGAGCCCCAGCCCG | 1209 | 193593308 | 193593333 |
| GGAGCCCCCGTGTGAGCCCCAGCCC | 1210 | 193593309 | 193593334 |
| GGGAGCCCCCGTGTGAGCCCCAGCC | 1211 | 193593310 | 193593335 |
| CGGGAGCCCCCGTGTGAGCCCCAGC | 1212 | 193593311 | 193593336 |
| GCGGGAGCCCCCGTGTGAGCCCCAG | 1213 | 193593312 | 193593337 |
| CGCGGGAGCCCCCGTGTGAGCCCCA | 1214 | 193593313 | 193593338 |
| ACGCGGGAGCCCCCGTGTGAGCCCC | 1215 | 193593314 | 193593339 |
| CACGCGGGAGCCCCCGTGTGAGCCC | 1216 | 193593315 | 193593340 |
| CCACGCGGGAGCCCCCGTGTGAGCC | 1217 | 193593316 | 193593341 |
| GCCACGCGGGAGCCCCCGTGTGAGC | 1218 | 193593317 | 193593342 |
| GGCCACGCGGGAGCCCCCGTGTGAG | 1219 | 193593318 | 193593343 |
| CGGCCACGCGGGAGCCCCCGTGTGA | 1220 | 193593319 | 193593344 |
| ACGGCCACGCGGGAGCCCCCGTGTG | 1221 | 193593320 | 193593345 |
| GACGGCCACGCGGGAGCCCCCGTGT | 1222 | 193593321 | 193593346 |
| AGACGGCCACGCGGGAGCCCCCGTG | 1223 | 193593322 | 193593347 |
| GAGACGGCCACGCGGGAGCCCCCGT | 1224 | 193593323 | 193593348 |
| CGAGACGGCCACGCGGGAGCCCCCG | 1225 | 193593324 | 193593349 |
| CCGAGACGGCCACGCGGGAGCCCCC | 1226 | 193593325 | 193593350 |
| GCCGAGACGGCCACGCGGGAGCCCC | 1227 | 193593326 | 193593351 |
| CGCCGAGACGGCCACGCGGGAGCCC | 1228 | 193593327 | 193593352 |
| GCGCCGAGACGGCCACGCGGGAGCC | 1229 | 193593328 | 193593353 |
| GGCGCCGAGACGGCCACGCGGGAGC | 1230 | 193593329 | 193593354 |
| AGGCGCCGAGACGGCCACGCGGGAG | 1231 | 193593330 | 193593355 |
| CAGGCGCCGAGACGGCCACGCGGGA | 1232 | 193593331 | 193593356 |
| GCAGGCGCCGAGACGGCCACGCGGG | 1233 | 193593332 | 193593357 |
| CGCAGGCGCCGAGACGGCCACGCGG | 1234 | 193593333 | 193593358 |
| ACGCAGGCGCCGAGACGGCCACGCG | 1235 | 193593334 | 193593359 |
| CACGCAGGCGCCGAGACGGCCACGC | 1236 | 193593335 | 193593360 |
| TCACGCAGGCGCCGAGACGGCCACG | 1237 | 193593336 | 193593361 |
| GTCACGCAGGCGCCGAGACGGCCAC | 1238 | 193593337 | 193593362 |
| GGTCACGCAGGCGCCGAGACGGCCA | 1239 | 193593338 | 193593363 |
| AGGTCACGCAGGCGCCGAGACGGCC | 1240 | 193593339 | 193593364 |
| GAGGTCACGCAGGCGCCGAGACGGC | 1241 | 193593340 | 193593365 |
| GGAGGTCACGCAGGCGCCGAGACGG | 1242 | 193593341 | 193593366 |
| GGGAGGTCACGCAGGCGCCGAGACG | 1243 | 193593342 | 193593367 |
| GGGGAGGTCACGCAGGCGCCGAGAC | 1244 | 193593343 | 193593368 |
| CGGGGAGGTCACGCAGGCGCCGAGA | 1245 | 193593344 | 193593369 |
| GCGGGGAGGTCACGCAGGCGCCGAG | 1246 | 193593345 | 193593370 |
| GGCGGGGAGGTCACGCAGGCGCCGA | 1247 | 193593346 | 193593371 |
| CGGCGGGGAGGTCACGCAGGCGCCG | 1248 | 193593347 | 193593372 |
| CCGGCGGGGAGGTCACGCAGGCGCC | 1249 | 193593348 | 193593373 |
| GCCGGCGGGGAGGTCACGCAGGCGC | 1250 | 193593349 | 193593374 |
| CGCCGGCGGGGAGGTCACGCAGGCG | 1251 | 193593350 | 193593375 |
| CCGCCGGCGGGGAGGTCACGCAGGC | 1252 | 193593351 | 193593376 |
| CCCGCCGGCGGGGAGGTCACGCAGG | 1253 | 193593352 | 193593377 |

TABLE 9
List of Exemplary Cell-penetrating peptide
Sequences (Organism: synthetic construct)

| SEQ ID NO | Sequence |
|---|---|
| 1281 | RRRRRRRRXB |
| 1282 | RXRRBRRXRRBRXB |
| 1283 | RXRRXRRXRRBRXB |
| 1284 | RBRBRBRBRBRXRBRXB |
| 1285 | RBRBRBRXRBRBRBRXX |
| 1286 | XRBRBRBRXRBRBRBRX |
| 1287 | RBRXRBRXRBRXRBRXB |
| 1288 | RBRBRBRBRXRXRXRXB |
| 1289 | RXRBRBRXRBRBRBRXX |
| 1290 | rXrrXrrXrrXrXB |
| 1291 | RXRRXRRXRRXRXB |
| 1292 | RBRBRBRBRBRBRBRBB |
| 1293 | RBRBRBRBRBRBRBRXB |
| 1294 | RBRBRBRBRBRBRBRBB |
| 1295 | RRSRTARAGRPGRNSSRPSAPR |
| 1296 | rrrrrrrrXB |
| 1297 | RRRRRRRRRXB |
| 1298 | RXRXRXRXRXRXRXRXB |
| 1299 | rXrXrXrXrXrXrXrXB |
| 1300 | RXRXRXRXRXRXRXB |
| 1301 | RXRXRXRXRXB |
| 1302 | RXRXRXB |
| 1303 | rXRrXRrXRrXRXB |
| 1304 | rXrrXrrXrrXrXB |
| 1305 | rBrBrBrBrBrBrBrBB |
| 1306 | RBRBRBRBRBRBRBB |
| 1307 | RBRBRBRBRBB |
| 1308 | RBRBRBB |
| 1309 | XRBRBRBRXRBRBRBRB |

Abbreviation:
B, β-alanine; r, d-arginine; R, 1-arginine; X, 6-aminohexanoic acid.
Sequences assigned to SEQ ID NOs do not include the linkage portion (X, B, or XB)

[0735] While preferred embodiments of the present disclosure have been shown and described herein, it will be obvious to those skilled in the art that such embodiments are provided by way of example only. Numerous variations, changes, and substitutions will now occur to those skilled in the art without departing from the disclosure. It should be understood that various alternatives to the embodiments of the present disclosure may be employed in practicing the present disclosure. It is intended that the following claims define the scope of the present disclosure and that methods and structures within the scope of these claims and their equivalents be covered thereby.

The application's sequence listing, which the Patent Office published only in electronic form, follows.

SEQUENCE LISTING (1319 sequences)

SEQ ID NO: 1 - DNA, 111668 bp, Homo sapiens
  source 1..111668: mol_type = genomic DNA
ataaacaaacattataaaataatgtggatttaatcattaacaaacaatttcaagttcttgcacagtttcacaaaggttaatgtgacccaaagcttcacctttataaagacaactctcgaatctgtattgcaagccccatctccctgtggaactccaaagcttgatttctaactgccacctgaataacccattcacacttcagcaccaatcatcattccaaagccagcattatcatccccttgtaatcagcttttctatatttgtgactgttactaataatgtcaattgactttggcttcaaccccattatcttttgattcctcttcctagtttcttcatttagcttttcattgttttaaatactccgaagtatcctttcaaagaatctctcacttcttcccattaccaggctttggttaagggccctcacacttgactttctcaacagccccctatccagtcttcctgaccctcagtttccctctttacaaattcatccttttctgtttctccaggattatcttttttgagcccactttatgacactatagtctgcctctgtgggtagtaactgttgctacccattacttggtcctcagcttgtactacctcacattaatgtttaccttttatgtatgtctgtcttcctaaccaaaccatggttagttgagggtgggaactgtggtttactctttttaaaaaaatatatcctcaggcctggcacggtggctgatgcctgtaatcctagcactttggaaggttgaggcaggcagattacttgaggtcaggagtttgaaaccagcctggccaaaatggtgaaaccccgtctctactaaaatacaaaaacttagccaggcatggtggcatgcacctgtaatcccagctactcaggagactgaggcaggagaatcacttaaacctgggaggtggaggttacagtgagccgagattgtgccactgcgctccagcctgggcgacaaagtgagactctgtctcaaaacaaacaaacaaacaaacaaaaaccaaatatatatatatgtgtgtgtgtgtgtgtatataatttgtgtgtgtatatatatgtatttatatcctcgactagggttcataggaagtgactgtaaatgtttgttaataaggattataacatgcttttctgagggctggggagagtttgataatgatgatggtgcaaacatgtatgacttcagctaattattggcttctccaggaaaccacaaagagtagtgttaaggaacttggagatctcccaagaagaactttgcaaaagcttttatgtataaatttaaatataaaacttatgaaatcaattttaaacatttccatttccattaacatctctcattaccttcctttctgaaaatttctgattcgttggataattctgaaaagggtcccttttcctgctaaggtaaatatttagagttttacctggtgaattgctcaattcccagctgaactggaaaatttagtttaaagtagtaaaattatttcatgacttctggatcagaaaaatatttttaacatgtttttacaagtaattaatacacaagttcagagtataaaagggtttacaataaatgtaagcctccctcccactcatgacccactaacttcaagtccttccttgactctgcccttcactagggcttatcaactcaaatattttcgtgggttaggcatgtaacataaatgagtaatgcaagtatgtctgttgtataatgtcatattaaattgtattcatataatttattcatataattttacttgcctacttgcatacttgtgttcttttgccaaaaaaaaaaaaaaaaaaagctctttctcattgttttggaaatggctgaccctctcagtccttcattttctctcacttttcatattgtaatcatccagcaggttcttcctgctcactgcacagacaaaatcatttcactgagaccagggcatcgcagtagaaaaagagtttaactgattcaagaccagcctatgcaggagaactggagttgtcactcaaatcaatcttcctgaaggctctgaggttagaggtttttatggacaatttagtgggcaaggggtagggaatggatgctgctgattggttggggatgaaataataggaaaacattccttgtgtgctgagtccacctctgggcggggccacaggatcacttgagtcatgagtcataagtctcgatggggtgagtctgaaatataccgcaaaaaagcagtcttagattctatagtaatgatgttatctataggagcaattggggaagtcataagatttgtgagttctggccacattgattcctgagcagtaagggactatagaaaccatacctacgtcttagcacagttcaggcccctctcatgatcctgttctcttggcctttcttacaaaggtggtttttggttcctgagcaacgagggagttagctttaggaagggactattataatcctttctttcaagttaaactataaactacattcctccccaaagttcatttggcttaagtccaggaatgagcaaggacagcttggaggtcagaagcaagatggagtcaactatgtcaggttcctcttgtcataattttgccaaggcagtttcaatataagtagtggttgtttttcctcttaatttttactaagaaaagtagaagcacaagcttcatgataaacagtaattgatgtgttcaatttcagaaagatgaaggagtgtgaactaccggagaggacatgagtgcctgaaggataaaactactacttggctcctggttccgagacattttttgtatataagaattgaaggttgatgttgttaggcatcctgatatttttatgtgattttttaaaatgtgaaatttgttgatttttatttggcaacaaatgtagcatttttttgcttgtttgtttttgagacggagtctcgatctgtcgctcaggctggagtgcagtggcacaatctcagctcactgcaacctctgcctcctgggttcaagcaatttttctgcctcagcctccgagtagctggctaatttttttatttttagtagagacagggtttcaccatattggccaggctggtctcaaactcctgacctcgtgatctgccttcctcggcctcccaaagtgctgggattacaggcataagccgccatgcccagcccaaatgtagtgttatttttaaaacactgcataggccaacactgtctaaaccaaacaaaacaggtctgtgggctgaatttggtccaatggttgcagtttattatacaacagtttgcccttttttcatggcaacactatgtatctatgggagatcattccttatcaggacatacagacctaaagcataggttttcatggctagtacggatgtaatttatgtgtctagttcctatacatggacatttatactgattccaatcttttcccatttcatacagtgcagaaataaacatcatcatgcatacatctttgcatacatgggaatgattccacaggataaatgcctagaagtagaactgcaaaacaagggcttcataaaacatatgataaccatatataaatggtgatggtggttagtttctcctttttttatggttaaagtcttttatccctaatttttcttttttgttgttgttgttaaagtctcttggtttctcttattttattttctaaaataacaaggaagtaacgattacaaagacactttttgtacaaccctacaatcccaggaagatctacagtttgcacaggttggtacagcaaattgctctctggacctgccattgaaacagtcaccacaataaataaagaaaattctaagagtcctgcatttgggaagtttactatcaatggctaggtctactcttggtggtattgtgagtgcatgggtccagacttatgattctgacaattaagggaaaaggaattgtctttatgctctgtgtatttgtgtatgtgtgtggcatgggtggggggcgggtagtggggaggaggtgaaaggtccctgaagtaaagaggatgcacaggacccttttattttagtccctaaaaattggcttcataaccgttcacaggccacatcccttttacgggccctggtttccttacaaaacataaaaggtttgtgttggaaggggaaaggagtatttaaagtgatggaggagaggagctcaagatggctgagatctgggcctgtccaacattgagaaatttgggaggggagccatcaaagaagcctgggagcagcagttccagggaaaaaggagaatgtgatggccagagagccaaaagaaaaagtagttgaaggagtgctcagcactaggcatctgaactgaatgctgtggcaggctcactggccacaaacaatagggagctggtggaggccttgacgaggaccatttcaacaaactggtgggcttaaaatccggaagaaacagttgaacaaatcattttgacgccttttataaaccacacaagcttattccaaacccgttactggcctaactgatttaagtccctttcccatctgatcctcagagattctaagggacttagcctatccatgactcttcgtcctgcttctcacctcccatgattgccctaacgatgtgaaagtgctttcaaacaaagatgcccaagaaagaaggtaggcaaatgtgcaagcattagtttgtagtacgctattactgtatttcaccttgcactctctagtttccttcgtgctccctcaatatccaactcttaataaattcatggctcccggtgagcattcatcaattctcattccacgcctttagcccttcccgttcccgcccaactctcgctccctcccctggccaaatctctaacctgcaaggctaattccgaattccaaatcggaagcaagagggcggggccccgtgagaggcgatggattgctccagtccgttcccgacgcactgtgcgcatgcgctggtcctccgcggaccgttcgtgctgcccgcctagaaagggtgaagtggttgtttccgtgacggactgagtacgggtgcctgtcaggctcttgcggaagtccatgcgccattgggagggcctcggccgcggctctgtgcccttgctgctgagggccacttcctgggtcattcctggaccgggagccgggctggggctcacacgggggctcccgcgtggccgtctcggcgcctgcgtgacctccccgccggcgggatgtggcgactacgtcgggccgctgtggcctggtaagtgcaggctctaatctggccccgttaattctggggcctcttgagagtggggctgtcttatctctatctccaaaaatgtgcaggtgactctcaggccaggccgacggcagttggagaattcccagatgttcttgaggacccagaatgacaggagccctggctgggcttacgttcggagccggcttcaatactggcccttttctctggccctacccaacccgaaaattctggacgcctctcaatcttggcccgtctctattgtccttttgtctctgccctttacacccttgtgtcttcagtgttctgtctgtctctggttgcctcttttgccttttttctgtcctctccctgccaggtttggctctgtccatgagtcacctctctccacatttctcctaactctcggtgtcttctttttcttccatttccacgccatgtgtacattgcatcttcaggtacctgggctcttctatcggggaaaggggcgtccgtctctttccctagcccgctgatagaagtcagaactagagcaatgacgcacacggtgtcagagacggtgattcgagatgccctttcaatagcagcttttttctgtgtttcgggagggagacttactttttgatgcaaggtcgtgaacgtggcaccacctttctaatctcaatcattgttgccctggggtggtttaattctaaatagaaaatcatagaaatcttttcatttctgtgcgttactatatgcattgtaatgagattaaattggattttataggaaattttgttctagtatcattagataccttcaagcttagctcattgttgcaggcatttgataggaagtaagatgcatcaagcaaaattggaaaaacgtggttttcctgaattaacttctaagcagttgttttgaattttttccagacctttttaagtggtatagataatttatcgtgtttataaggaatggaatgcattcgttagtttgtttttgttttgttttgagacggagtcttgctctgtcgtccaggctggagtgcagtagcgctatctcggctcactgcaacctccgcctcccaggttcaagcaattctcctgtctccgcctccggagtagctggaattacaggcacgcgccagcacgcctagctaatttttgtatttttagtagagagggggtttcaccattttggccaggctggtctcgaactcctgacctcatgtgatccaccctcctcgacttcccaaagtgctgggattacaaccgtgagccaccgcgcccggcccaatttgttttatataggttaactggagtccaaaatacagaactagatgagataacaatagttaacagtgttagtcagttagaattattgcataggtatttttaatctcatggaattttagtctttgagtaagttcacagcccttggtattaaagtaagttatttacaacccttgcatttctacttctcaatatttagtgaggaaacatatctgattttctttaaataaaaagagaaaagactgcagaagatagcattctctgttggagcaattaagatgtataagaagaactacaaagacggagttttaaaacaaactgatttataagtggtatttatttaattggctgtcattgggctaaattatttctaaagttaccatggatgccattgagtcatggcttaaaaatgtctcctggtgatggcacagtttagctacctaaagaagtagagatgtgggaagccagaagccccaagctctgcagtttttcttttgctatagttcctttgcatgttgtgaaagaatacagttaaattcctgctccctaacagatgagagcataagcatttctttgggcatacatatgtaaatacatgctcatggacatgtgaaaagatcaatactaacatttgggtgcaataaataattgtgtaaaattatttttaaaagaattacatattaggaaatgatatattgattaaaagtgatagtcaatgaacaagagagtagatttctgggggaaacctattttgcatcatacttgatttttagttttgactgaatattgaagtctatattcaaaattcttttcctttagaactgtaaaggcattgctgcattttcttctaatgtaattgtttattgctgctgagaattcttatgacaatctgattttttcatcttcatgattatcttgtttttcccttcatggaatctgttagggtcttgactttatcctttatcctaaatttctcaaggcttggaccaggtgtgggtttggttttgttttcttttgctactcatttgacttggcacactcagtgggcctttccctttatctttcttcatttctgagacgtttttctctcttattttttattatcttcctttcatttttcctgtcctttttctttctagacatctcttaggaggatagtggtcctcttagattgatatgttatgtccgtgatttccaaagtaagatttgtactcgtcgtctgttaaaaggaaaagcatacatataccctatgtatatatgcacacttttttatttttaaattatatatgtatctgtactaattatttacattgtaagtcaaccctaacataatcttaaaggataagatacaaaacatactgcatctagaagcttcagtactttcttcctgaatcccagtagatccttttgttcatcccacgggatgcattccgcccccatcctcccactccctttggataccacattaccacagctctgcatcacttaactttcctcttatgtttttcaccttttttttttttttttttttgcattttatgtcctggggaatttccttaattcatttcatggttttactgttgatttttttaatattggccatcgcaacttttcttttcttttcctttcctttcctttcctttcctttccttttcttttcttttcttttcttttcttaattttcttttcttttcttttcttttctgttcttttcttttcttttcttttcttttctttcacacaggatcttggcgtgttgtccaggctggcctcgaactcctgggctcaggtaatcctctcaccttggcctcccaaaatgccaggattacaggcgtgcgccactgcatttggcggcaacttaatttttttatttttatttttccttttagaggacacctagcactgagcattgcaacttttcatttccatgaacttttaagaaaactcttaaagacatgtttaattctgtacactttctattgttctttgattgctgtttttgaataacaacaaggagtacgccttagcattttgatggtatcctcttaatagtcgcaataatagtccccttggcgctctgtatactctcaagtcttaaatgttttgtatgcagctgtacgttgacagttgaatggtctcgctccaagtggatcagcaagaacataaagaatcatttaactggtacaggctgcggcttgtgaattccctattaacaccaaagaagacgtgtgagactccgtactgaaactaaagacgacttgtgagttccacactgagatcaaataagtctttatgatggtgacagagagtggtgtcaacgcctaaagttttggttaatctctctaaattgaggggctgaccaaaagggggaacttaactgtattagacataattttgagaaacatgggtatgtggatggtaatggaggaaatgggtgtagatgagattgcctagggagagtgagaagtaggttaggtctaagccttgatgagttcccaacatttccaagggtagttgaggatactgaaaatgagtggccagtgagatagaggtaaagctagagactgcccaggggagaggaattttcaacaatgaggaggtgtcaacattgtcaggtattgctgagaggtcagataaaaccagaattgagcaaaatggccattggaagcctatggtgccctccgtaagagctgtttcgctgaagtgatagaaacggaaatcaggctgggcacagtggctcactcctgtaatcccagcactttgggaggccgaggtgggcggatcacctgaggttaggagttcgagaccagcctggccaacatggtgaaaccctgtctctactaaaaatacaaaaagtagccaggtgtggtggcaggtccctgtaatcccagctactcaggaggctgaggcaggagaatcgcttgagccccagaggcggaggttgcagtgagcagagatcgagccactgcactccaacctgggtgacagagcaagactccgtttcaaaaaaaaaaaaaaaaaaagaaatggaaatcaggatggtttggcttttattttaataaaatagctagagcagggaaatggggtactttttttcccccttttaagatgagacatagccaggtgcagtggcttacacctgtaatcccaacactttgaaagggagggtcgcttgagctcaggagtttgagaccagcctaggcaacatagcaagaccttgtctctactaaaattcaaaaaaaattaactgggcatgctggcacacacctctagtcccagctatttatgaagctgaggcaggaggatcacacttgagcccagatacgtggggctgcagtgagccctgataatgccattgcactccacgttgggcaacagagcaagacttcgtctcaaaaataaataaataccctgtctcaaaaataaaaaataaatatgggaggagagatttgacttagattcctcaaagggcaggaggaaagagaattccaaacagtgattcacctttaatgggagaaagatcgcttaattttacatgaggaagaagaggattggtggagatacagtaggtgaacagtttttgtatgaggaagttgaacatgtgtcattctaatagcttccattctctgtgaagtagagggcaaggtcatctactgagagttggggaggtcaagagagataaggggagattagaagagctcttctagcagagagtggaagaatgaattgctaagagagatgaagtaggattgttaagtagttttgagggccctgttgagatgtgcttccagttgggtgtgattttctccagtagtgctttatttccctgggtacaggcagagagaaaaacaataaggctcatgtagggtttgtattttgttggacaagtcaaacagaaaagtcagaggacgagggagtttagaatgtttgcaaaagagttattgaaacgatgaaccgcataatctaaggtggtaagtgggtgaatagataaggaggatgtgaataggtaaggagaagaaagaaatatcagattattgattattgatggcgactctctaatacagctattatgccattttaaccgattaagaaactaaggctttagaaaattcataatttgccctaactgcacagctagtaagcagtggaaatgtgattggaaccagagttcttctgactcaatagactaaatggatgtaaggatgtagttgaaagaagggtgagctaaacgttgtggaaccatgagctctttctctggttgatatccctctctgtaagtgataacatgggtcacgctggataaaaccttgtggtgattggtgactttcctttgtccttcctcctgtgcctagtctggcgagtatctgcctttccctttcctttctcattgctgccacctaactttaggctcttccccttacatctgggtaactgaaataagatcacctttttgttccccttctgatttactttgacctaacattatctttactattttctttaaattaatgtttcattagtcttattctactcaggaactctgtagttccccattgcctacgaaaaaaagttaagcctcagccttatattcagtgactcttcaattggatattcagtccagttttactcctcctatgagccttctatgccagctccttgggtctcttgccctttcattgtctcagctctgcacccttctttctcttttttattcttttttttttttgtacttttttggttttctttttggtttctttttttgttttatttattaaacctccatcacacttcatcctatggagttttgaaccacagcaaggtgcagtatcatcctggggctctggaggaagtggcagggagtccaaaatgtcaccttagcttcttatctggggccacatgtatttctgcatctgctgcttcccacactcttgcccacaagtgtcgcttgtggaaataatttgagatttactgtctggctgaccctagtttcaatctcttttccaccatttgctaatcattctaccttgggcaaaacatagaattaaaagaaaacttcagacaagttaaatttgatggagtttaattgagcaaagaaaaaaaatgatccacaaattgggcagtctccagaatcaccgcagattcagagagactccaggggtgcctcgtggtcagaacaaatttatagacagaaaaggtaaagtgacctacaggaatcagaattgagacatagaaacagtgagattggttacagctcggcgtttgccttatttgaacgcagtttgaacactcagcagtctatgagtggttgaagtatggccgctgggattggccaacactcagctgttattacagatgcatactactaagttaggttttcgattttgtctgcctatttgagctaggttacagttcgtccacaaggactcaaatataaaagtacggagtcctcttcgggccatatttagttcgctttaacaattcccccttttggtcagcccctcaatttagagagattgaccaaaactttaggcgttgacaccactctctgtcaccatcataaagacttatttggtctcagtgtggaactcacaagtcgtctttagtttcagtatggagtctcacacatcttctttggtgttaatagggaattcacaagttgcaactttgtaccagctaaatgattctttatgttcttgctgatccagttggagtaagaccattcaactgtcaatgtacagctgcatacaaaacatttaagacttgagagtatacagtgcaccaaggggactattattatgactgttaagaggacaccgtcaaaatgctaaggtgtactccttaataaaagttcttatgaaatgaactgaaccaaatcagccaagttaaggttcagacaatataagcagttcagcagtattggggtctgattggtcagagtcttcagttggagtatgatagtgattaaggatcatagttcgctgtaaagtagcttgacttaaagaggtgctcgttttcattgttaccttgttaatacaagtcataataacttgaaaacctgctagaagagatataaagattagaaacccttggaaaacccaagcttgccattcaccacttaggatgcctgcaaaccaactgttagttgctcctataaacatatcgtgggttcctttctcttgagagatttctttattgtacttggtggcagtgtctaaggaaacagcagtatcagccaccttttaaattaagctttttgtagtaacagaatcaggggagggattagtacaaaattcagttttgtttaacaccaaacataggcctccagcttgagcaaaaagaagatctaagactgcatgatcttccattaagtgttttcgttgaatatgtatgttgtcatgtgcctttctgagagtagcttctacccatctgaaaccctgggaggtctgattggctaccaaatccaagaattttcccaatatacaaattagttttaaattccgtacaaatggtacttcactaccaccaagagtgagcccccaggaaccccagtggaatctttccccggtagaaactagcttatcctcgtctatttcgaggctagtgctaatttcagttattgatcattttggcctccaagtataagggctatcatgagaattttcaggggaagcaattcgaaaggcaggagcaggccaggccagataacaagaaccaaaccaaccaaggaggcagaacagaatatgcagattctccacagacccaatagagaccctcaggggttggaaaagggggccacctagttgtatttgagcagggatcattcaggtttgttcgaccatgaatctgtagctcctgaataacatccagtgggaaatttacttttctatggcccctttgtagtgtgttgtaagggtgtataaccacatctagtaaaaagagaccctactggatatacaagcaatcacttgtactaacataagtaattcccaaatcttgagtatgtgatgcctgcaagcacaatatacgttttgtaggcatcatttggatttgttttttatatttggtgtgatcgactttatcagttgaaaaagagtgttgtttttagtgagtgtaggaaagcaagtactagtgatgtttagagtatcaagaatagctttccattcttcccttggggtttcagggtgactcattgggaaacgtggaggggcactggcacccttggaatcatttcctgattttttggcattagcccacaaacccaacagttaccctggttttgtgctagagcataagcttgagctgaagccatccactgattatggtcccatggattttcatgtaaggaaaaggaaaggattagggaaaaaaataaggaaaacagaaaaacacataaggctttcatggtggtagagaagtcttgatctgtgatctagggaaagctgtctgtaaccaggatgctgtctgcttctgggaagagatttccctggtcagctttaccttaaagtctccaacgggtatatagtaccaggagtctgagggggcccttttgaattgtgagatgtggacccatggttcaaagccctgaagcttctctgcactgtgggtggtaagaaggacttggtatggtcccatccaacgaggttcaagagtgatcttcttctgatgtcatttccggaaggcccagtctccaaattccagaccatggagggtttgattgtcctcagttggtggatcttgaaatgcttcctttacctggtggaagtatactttggcgtaatacattaaagccttgcagtatttagtcatatcagagtttaagagagcaggagaagcatgagatgctattattagggacatgggcctcccagtgactatttcataaggggtcaatttatgttttccaacaggattgaatctgattgccattaaaaccaaaaggtagtacctttggccaaggcaactcaattgattcagttaacttggacagtttcagttttcaaatgccatttgttctttcaagctttcctgaagactgagggtaataaggacaatggtaatgcaactgtgtcagtaacaccttatttaactgctttataacttgctcagtaaaatgagttcctctatcactggagacttttagagggatcccccataaaggaaaaacattttctaataatttcttagctatggtcacagcatcagctttcctacatgggaaggcctttatccaaccagaaaacatgcaaactattacaagaacatactgataccccattgagggtggtaactgaatgaagtccatctgtaaatgttcaaatggtccatcaggtggtggaaatatactgcctctagtttttctgggattatgagtttgacaagtcaaacattgattataagccattttagtaatgtcagaatagtcaccccaccagtattttttcataatttggatcactttgtctgttccatgatgagctgtggagagctttcaataatggaagcttcaaagattcaggaaggaccaggcggccgtccgggccctttgtgagtctttgcttcacgttaaatttacatccttttagataccagttttgtttttgcaaatcagatgcgttgcactgtttattaaataggtcatcgtaaggaaattggcttggattaatcttatggagttcattcagattgcgtatcttgatggttccagcactagctgattgagcataaaaatctgctaaagcatttcactgatatttgggttcatttctacaagtatgagcttcagtcttaataacagcaatctgcatttgtaacaggatagcagaaaggagctcatctgtttggagtccatttttgatggggatcccactagaggtgagaaaccttcgtagtttccatatcatgccaaaatcacgtactactccaaaagcatgtctactatccgtaaatatttactgacttgtccttagctgtgtgacatgttcaggtaagggcagaaagttctgcaggttgggctgacttgacttgaagagttcgcttctctattaactcattttgggtggtaacagcatatcctgactgatatttttttttctgagtttttggcataggacccatcaacaaaaagtgttaattcaggattatccagtggagtatcttgtatagcaacacgaggggccactatttctgatactacactcacaccgttgtggtcttcaccatcatcaggcagagataacagagtagcagcattaagtagattacagccttttagatgaagataagaaggagataggagaagtaattcataagatgttagtctactcactgaaaaatgctgggtttgattggaatttaatagactttccacagcgtgtgggacttgcaaattaagttcatttcctaaaaccagatctgatgaagcttctaccagcttggctgctgctactgcttttaaacaattaggatatgccttagagactgggcctaattgcaggctatagtatgcagtggtcctatgtttagcaccgtgttcctgattattacattcatgaacaaacaaagtgaaaggtttagtgtaatttggaagtcctaaagctgggggctgttgtaaggccaacttcatttggctaaaagcctgctcatgactgtcttcccaaggtaaaggctctggtacagcatttttagtgagctcatacagtggtgaagctattaaggaaaaatttggaacccaggatctgcaatatcctgcaagcctaagaaagccttttgtcttttggttgcaggtcgaggaaaactttaaataggttttatcctctcaggtaagagggaaatcccttcagcagccaagtcatgtcccaaatagtggactttttcttttgaaaattgaagttttggccaggcatggtggctaacgcctgtaatcccagcactttgggaggctgaggcaggcggatcacctgaggtcgggagttcaaggacagcctgaccaacatggagaaaccctgtctctactaaaaatacaaaattagccaggcgtggtggtgcatgcctgtaatcccagctactcgggaggctgaggcaggagaatcgcttgaacccaggaggcagaggttgtggtgagccagtatcacaccattgcactccagcctgggcaacaagagtgaaactccatctcaaaaaaaaaaaaaaagaaaaaagaaaagaaaaaattgaagtttttccattgaagccctgtgacctttatatgcaagttgctgtaaaaggtaaactgagtcaatttccgggcactccttaataggagagcataacaataagttatctacatactgaatgagagtagaattttgaggaaactgtagtgtcattaactcctgatgcagtgcctggggaaaatatgaaggggcttcagtaaacccttgtggcattacactccaggtgtattgctgatttttccaagtaaaggcaaacaagtattgactttctttatggaatgctagagaaggctgagccaagatctattactgtggacaacttggaatcagtgggtacattaggttataaagtattaggatttgggactacaggaaatcttggtattacaattttattaattgcctgtaaatctggaacaaatctccagtctcatccattttgttttttaactggtaggattggagtgttacaggggctggtgcatggaattatgagtccttgtttaattaaatcttctacaattggtgagagcccttaaattgcttcaggttttagtggatattgtggtaattaggcaaaggtttagaatgatctgttagtacttttataggttctacacttttaattcttcctatatcagttgggaagaggcccataaacattaggtgttttcgaaagatcaggggtattacaggcttgagtttcgatcttatcaatttctgcctgtagacagcataacaattctagttcaggagaatcaggaaaactcttaagattatttctgtttctgaggaaaattttaggtgcccttttagctttgaaagtaaatcttgccctaccaagtttactggaacagtatcacgtagtaaaaaactgtgtttttctgaaagggggctcagagttaattggatgggttcagatatgggaacctctggaacttgatttgaaacccctgtcacagaaatgacctttttactctaagggatttgttggcttattaaggtggggtttatggtagatagagtagccctggtatccataaggactatacacaactccctatttattttaacctctgtttccccatgttcctttaaaggtattacggggagcaatccactggagaatcccttagagcctcctttaagttgaatattgtcaggaggactaaggtctcttgggctccctctagtggtgaaacagtttggcctagagggaggtttatcagccgacaatcccttttccagtgccctggttgtttgcaatacaggcagacatcttggggtaaagaaattcttgttctgggacctcttgatttgatttttttaatatataattttaaaaatattttccaaagtgtgacttaaaaaaatttttttttattatactttaagttttagggtacatgtgcacaacgtgcaggtttgttacatatgtatacatgtgccatgttggtgtgctgcacccattaactcatcatttacattaggtatatctcctaatgctatccctcccccctcccccaaccccacaacaggccccagtgtgtgatgttccccttcctgtgtccaagtgttctcactgttcagttcccacctacgagtgagaacatgcggtgtttggttttttgtccttgtgatagtttgctgagaatgatggtttccagcttcatccatgtccctacaaaggacattaactcatcattttttatggctccatagtattccatggtgtatatatgccacattttcttaatccagtctatcattgttggacatttgtgttggttccaagtctttgctattgtgaatagtgctgcaataaacatacgtgtgcatgtgtctttatagcagcatgatttataatcctttgggtatatacccagtaatgggatggctgggtcaaacggtatttctagttctagatccctgaggaattgccacactgacttccacaatggttgaactagtttacagtcccaccaacagtgtaaaagtgttcctatttctccacatcctctccagcacctgttgtttcctgactttttaatgattgccattctaactggtgtgagttggtatctcattgtggttttgatttgcatttctctgatggccagtgatgatgagcattttttcatgtgtcttttggctgcataaatgtcttcttttgagaagtgtctgttcatatccttcacccacttgttgatggggttgtttgtttttctcttgtaagtttgtttgagttctttgtagattctggatattagccctttgtcagatgagaagtttcagaaattttctcccattctgtaggttgcctgttcactctgatggtagtttcttttgctgtgcagaagctctttactttaatgagatcccatttgtcaattttggcttttgttgccattgcttttggtgttttagacatgaagtccttggccatgcctatgtcctgaatggtattgcctaggttttcttctaggatttttatggttttaggtctaaattaagtctttaatctatcttgaattaatttttgtataaggtgtaaggaagggatccagtttcagctttctacatatggctagccagttttcccagcaccatttattaaatagggaatcgtttccccgtttcttgtttttgtcaggtttgtcaaagatcagatagttgtagatatgcggcgttatttctgagggctctgttctgttccattggcctatatctctgttttggtaccagtaccatgctgttttggtgactgtagccttgtatagtttgaagtcaggtagcgtgatgcctccagctttgttctttggcttaggattgacttggcaatgcaggctcttttttggttccatatgaactttaaagtagttttttccaattctgtgaagaaagtctttggtagcttgatggggatggcattgaatctataaattaccctgggcagtatggccattttcacgatattgattcttcctacccatgagcatggaatgttcttccatttgtttgtatcctcttttatttccttgagcagtggtttgtagttctccttgaagaggtctttcacatcccttgtatgttggattcctaggtattttattctctttgaagcaattgtgaatgagagttcactcatgatttggctctctgtttgtctgttattggtatataagaatgctctcttttgttctttgttagtcttgctagcggtctatcaattttgttgatcttttcgaaaaaccagttactggattcattgattttttgaagggttttttgtgtctctatctccttcagttctgctctggtcttatttatttcttgccttctgctggcttttgaatgtgtttgctcttgcttctctagttcttttaattgtgacgttagggtgtcaattttagatctttcctactttctcttgtgggcatttagtgctataaatttccctctacacactgctttgaatgtgtcccagagattctggtatgttgtgtctttgttctcattggtttcaaagaacatctttacttctgccttcatttcgttatgtacccagtagtcattcaggagcaggttgttcagtttccatgtagttgagcagttttgagtgagtttcttaatcctgagttctagtttgattccactgtggtctgagagacagtttgttataatttgtattcttttacattttctgaggagagctttatttccaactatgtggtcaattttggaataagtgcagtgtggtgctaagaagaacgtatgttctgttgatttggggtggagagttctgtagatgtgtattaggtccgcttggtgcagagctgagttgaattcctggatatccttgttaactttctgtctcgttggtctgtctaatgttgacagtggggtgttaaagtctcccattattgttgtgtgggagtctgagtctctttgtaggtcactcagggcttgctttatgaatctgggtgctcctgtattggttgcatatatatttaggatagttagctcttcttgttgaattgatccctttaccattatgtaatggccttctttgtctcttttgatctttgttggtttaaagtctgttttaccagagactaggattgaaacccctgcctttttttgttttccatttgcttggtagatcttcctccatccctttattttgagcctatgtgtgactctgcacgtgagatgggtttcctgaatacagcacactgatgggtcttgactctttatccaatttgccagtccgtgtcttttaattggagcatttagcccatttacatttaaggttaatattgttatgtgtgaatttgatcctgtcattctctcaacatttgcttgtctgtaaaggattttatttctccttcacttatgaagcttagtttggctggatatgaaattctgggttgaaaattcttttctttaagaatgttgaatattggcctccactctcttctggcgtgtagagtttctgccgagagatcagctgttggtctgatgggcttccctttgtgggtaacctgacctttctctctagctgccattaacattttttccttcatttcaactttggtgaatctgacaattatgtgtcttggagttgctcttttcgaggagtatctttgtggcattctctgtgtttcctgaatttgaatgttggcctgccttgctagattggggaagttctcctggataatatcctgcagagtgttttccaacttggttccattcttcccgtcactttcaggtacaccaatcagacgtagatttggtcttttcacatagtcccatatttcttggaggctttgttcgtttctttttattcttttttctctaaacttctcttcccgcttcatttcattgatttgatcttccatcactgataccctttcttccagttgatcgaatcggctactgaggcttgtgcatccgtcacgtagttctcgtgccttggttttcagctccatcaggtcctttaaggacttctctgcattagttattctagttagccgttcgtcgaatttttttcaaggtttttaacttctttgccatgggttcgaacttcctcctttagcttggatagtttgattgtctgaagtcttcttctctcagctcgtcaaagtcattctctgtccagctttgttccgttgctggtgaggagctgcattcctttggaggaggagaggtgctctgatttttagaattttcagtatttttgctctgtttcttccccatctttgtggttttgtctacctttggtctttgatgatggtgatgtacagatgggtttttggtgtggatgtcctttctgtttgttagttttccttctaacagtcaggaccctcagctgcaggtctattggagtttgctggaggtccactccagaccatgtttgcctgggtatcagcagcggaggctgcagaacaacgaatattggtgaacagcagatgttgctgcctgatcgttcctctggaagttttgtctcagaggggtacccggccatgtgaggtgtcagtctgcccctactggggggtgcctcccagttaggctattcgggggtcagggacccacttgaggaggcagtctgtctgttctcagatctcaagctgtgtgctgggagaaccactgctctcttccaagctgtcagacagggacatttaagtctgcagaggtttctgctgccttttgttcggctatgccctgcctgcagaggtggagtctacagaggaaggcaggcctccttgagctgcagtgggctccacccagttcgagcttcccagctgctttttttacctgctcaagcctccgcaatggcgggcacccctcccccagcctcgctgccaccttgcagtttgatctcagactgctgtgctagcaatgagcgaggctccatgggcataggacccgctgagccaggcgcgggatatagtctcctggtgtgctgtttgctaagaccatcggaaaagcgcagtattagggtgggagtgacccaattttccaggtgctgtctgtcacccctttccttggctaggaaagggaattccctgaccccttgtgcttcctgggtgaggcgatgcctcgccctgctttggctcatgctcggtgcgctgcacccactgtcctgcacccactgtctgacaatccccagtgagatgaacccagtacctcagttggaaatgcagaaatcacccgttttctgcgtcgctcaagctgggagctgtagactggagctgttcctatttggccatcttggaaccgcccgattgtgatttaaaatgagaacgagatggtccctttggttcctggtccctgtaactgttgcaattgaaggggcataagcttattagccttttgaggttttttttgctctagagtcttctcaaaatgcttagctaggttgggcacgatggctcacgcctgtaatcccagcactttggaaggccaaggtgggaggatcacgaggtcaggagatcaagaccatcctggctaagatggtgaaatcccatctctactaaaaatacacagattagctgggcatggtggcacacgcctgtagtcgcagctactcgggaggctgaggcaagagaattgcttgaacctgggaggcagaggttgcagtgagccgagattgcgccactacactctagcctgggtgacagagcaagactccacctcaaaaaaaaaaaaaaaaaaaaaaaaagttcagctaaggccaccaattcagtcacatctctaacttcccattgcaacttatgttttttagttaaactgctaagttcaggatggagtccatttataagtaaagcagttaatgctgtttcagcccctgcagggaatactccttgctgtactttgagcccaggatgtttcacaaatatttctaagcgacttctgtaatctgaaactggttcatcttttcttttcttttttttttgcttacaagattgtatgatggaccaattttttgtggaaaaattttaggaactgaatgttaaaaggttttcagcgatttttctagctatttttggtccttcttgtgaggagctcttagagggccctttaaaatgtcctcctcaggtttgtcccattctgctgctgccatccatttctgagcttcaccagcccccagtatcatatgaataaattggtaaattcatgaagtcctggatcgtaagctcctattaggattctaaattcctcagtaaatttttgagacttttcccttggaccagggaagtccttcacaatggggctaagctcagttttagaccatggagtgaaagtagttacagcaggcaggcctggctgatataaggtctcactttgtaagacatctgtctaacttccttttttttttttttttttttttaaatcatcttcagggtgaaagtgtaatttaacaaaaagtttagtggactcagagtatgtaggtagagatggacaaagaaggaacagtccgagttagatcagtcaaagtacagtcctctttcttcatgtccttggtctgttgcttaagcttttcatttggtttttgcaaagaatcttttaaggaggcactttttgattcacttagtcttttggaggcctttgcgtatccatgagacaatacatcccactgtatttgtgggggctttgatcccctttttctaatatgccttgcaaacaattttatccaaattaaaacttctccattgtggccattttaattctaagttttctttagtgaggttaacccattttactgaaaatgcacatgttctgggcccataatttttatacgtaaaattagctggagtccctgaagatggagtcccagactccttggattgagatgatcccattattaaataaggtacttatcagaggtctgaggcctctaactgaatccaatccagttaattatcaaatccaatttgatcttggatccagtccaggctaagtattgcttgagtaaactcggagagctcaaaacacaagttagtggagctcggaatctgagagaaaactcacccatgacctccagttacaatcaagagaccagtgagagcaacggcctcagtgggtacctcaccaggtcacctggtgttccagggggttgccagagtttttcttcaaatcccacttctgacaccagatctgttaaaagaaaacttcagacaagttaaatttgatggagtttaattaagcaaggaaaataaacactttgcaaatcaggcagcctccagaattgaatgcagtttgaacacttagcagtctattagtgcttgaagtatggccactgggattggccaacactcagctattattacagatgcatactactcaggttttccattttgtctgcctattgtgctaggttatggtttgtccacaagaacacaaatatagaagtatggagtccttctcaggccatatttagtttgctttaacaatacttaaaaaaaaaatttgtaaaataaggatacttaaccttactcggtgtttctgagagttaacatttatatagttatgctgtagtgaaaacagctagcgtaatgtctggtatgtataggaacacaagagataccgcttttcccatatccccataccattcttcacagcattgctcctgtcttccttgattcctcctcctccttctttgttttttttttgtttgtttgtttgtttttttttggaggtggagtctcactctgttgcccaggctggagtgcagtggtgtgatctcagcttactgcaacctctgcctcctgggttcaagtgattctcctgcctcagcctcctgaatagctgggattacaggcacacaccaacacactcagctaatttttgtatttttagtagggatggggtttcaccatgttggccaggctggtcttgaactcctgacctcaggtgattcacccacctcagcctcccaaagtgctgggattacaggtgtgagccaccacaccctgcctccttcttaagaagtttccagtcccttgtaattaaaggaattaatattttttaactacttagaatcagactggccctgattattagtaagcaactaatagtaagcaagcaactatgtatgcaactatgagtgtatgttaagatatggttgttggtaacctttcattctcttcaggaagaagaagagggtggagctctacagtcaatgtgtacatttaaattctgttccctttcgagcttttttgctactttcattcttctggggatccaggtgcttgagttgggattgattaacttccttaatttccacccctgtgctgtcaggatcgggagacatagatgaaggtgttctaaactgctagaaattttgtttttgaaagcaaaagtttgcatgcatttttgttttcaacttttacttacagtgaatagtagttaataaaataagtccctgccttttctctctttggtttcaattcctgagaccaggatcatagcccacatattagagtggagtcccactgctttggtttgaatcatgcctttgtttcttatgtcagtgtgactttgggcaagttatttaagtctttgcaccacattttcctcatctgtaaaatgaggataatactagtactttctacatgggattgttagcaggattaaatgagatagcacatactgtaaccatgtctggcacatagtcaatggttagtaaatgtgaactattgtgtgacattgtggttagtcacgtatggggctgtgtttcctttagtatattgctcttttaatgtcatttcctttgtactgttaccctctctgatctttcttccatattcatttttctttcagtgaggtctgccagtctttagtgaaacacagctctggaataaaaggaagtttaccactacaaaaactacatctggtttcacgaagcatttatcattcacatcatcctaccttaaagcttcaacgaccccaattaaggacatcctttcagcagttctcttctctgacaaaccttcctttacgtaaactgaaattctctccaattaaatatggctaccagcctcgcaggaatttttggccagcaagattagctacgagactcttaaaacttcgctatctcatactaggatcggctgttgggggtggctacacagccaaaaaggtgaacttgacattcctcctggttttccaattattatatcatgattaagtttctatagcataaatcatttttgtgtagtggaatacaattggatgtttaaacatttattttgtgtctctaccatggactagattgttttaatgatgctaataggaagatgcctttagaatcttagttataattacaggaaattaaaatggcctagtggaaggagcacagggctgggaataggaacacctaggtttgattttgagcttagacatttagtagcacagatgtgaaagtcaggtggcattctcacacaagcacttcttggcaggtctgggaccagaggcaaggcgtcctgtctcccagtctgtcttccttctaccccacagtaatatttagggcaaaattatgaaacctgtttgaaataggagtatattctgaatttttacattttccatatttaacagaggagtgttaacttgttttatatgcttgtttgctgagaccacttaattttgtttcttaaaagttttgaacataatacattattcttagtagattaatgtgttttaattaaataatttttctttacatgtttatttggcatgcagagcatctgattgacacactttcttgtcttttagacttttgatcagtggaaagatatgataccggaccttagtgaatataaatggattgtgcctgacattgtgtgggaaattgatgagtatatcgattttggtttgtatcatgaacattaaaatactttttttggtcatctcgaggaaagagaaatagtttattgagatagtttcttaacttatgaacctaatatatcacggttttattttaatgatataagtaatagaatatcaatgaaaaaatctgtataaaagaaatacccagtagcccataattttaccacagctgccactaactgtttggagcattttcttttaattatacttactatatgtggttagtatctttttaacttatcgattgagacaggatcttgctctgtcactcaggctgaagtgcggtcttggaatcataactcactgcagccctgaactggctaaagtagtccttccgactctgcctcccaagtagccgggactacatgtgtgtgccaccatgcccgactgattttttaatttcttgtagagatgaagtctcactatgttgcccaggctagtctcaaattccttagctcaaacctctcacctcagcctctcaaagcactgagattacaagtgtgagccactatgcctggcttgagtttttttcttttaatttttttcttttcatgaatactaccacagaatagtattttagttccctttttaaaaattatgtaatcatggtgaatattcactttggtattttgtcttttgctacctaacatattttgtcagcatttccatgctgccaagtagcctttctattaataatatcattttctgcattatgtaatgttgcccagagcatatttattgtgacccacctagctagctccttttgattggataccttggttatctctaccttttgtagccaagttctttaaaagtctgttagtatccagggtaatttcttttcttagttggccactgccctccctttttcaataggtggatgagaaaaaagtatattggatcgctatgattgccagtaattcatggtgatctttaagaaatatattttcatcaaatttttttaaaacctttgtcagatttcttagtttaggtgtatgtggaggtggaattaatctatacttgcacttattcacagaatttataaagataaaactgttctatgttgacgaatccatttgcaaaaaaagcacactttcaaattgttcttctaatattaatgaggagagctttcaaattgatgtatttgccagtaccacagcgtagtggctgagagcctgtattctggagctggactgcctgggctggaacccgggctcctccacttccttgctgtgtaccttagtttctcatctgtaaatggtgttgataatagtagctgttttgtagggttgtcatgaggattaaacaagttaatactttagccctttataagaatagtatctgacatattttcttagtttcatactctatatgttttgatcttttccagagaaaattagaaaagcccttcctagttcagaagaccttgtaaagttagcaccagactttgacaagattgttgaaagccttagcttattgaaggacttttttacctcaggtaaggaagaagctgtttgatctaatttaaaaatttaagaaccatggaggaaaaatacatggattatttgtttattcccatttttttaaaattaaaatatttagtaccaatgaaaaacaggacattttttaaaaagataaacacaaagttttgttacacaatggttttaatctttgtgtagcccagtaaaatgacagttcctaagcacttaaacatacttggcttttagtgaggggaaaaaatgtatcacttgttcttgacaagtagatgagacttcctatgtatttgcttttcataagtggttggaccaatttggtggttttaaaacaaatttaagtatgatagaccataatgagtagcatttattaagtttaatcctggcatatttgcccaattattgccctatcgtaatatgaaatctgagatctcagacatctttgtttgctcatttctgttaaattttacatttctatttccccttttgctgatttttcacaggtcacaaattggttagtgaagtcataggagcttctgacctacttctcttgttaggtgtgtaaacagacatttttgctgaccttaacatgccttttaaatgcttctaataaactagttgcaaataaaattgcagaccaaatttataatgctgcttatgctgaattttaaaaccccagaactatattaggcaaactcattatcctttaggtggaaataataaaataattattttgtgataacactaaaattcttaaatatgtatgtgtattataagattaaagctattaaaagaaaatttacttagcaaaaatattttcttgaaatagatctaattgtttttgataattgaaatgaaaagtaattttagtttgtctcatctgccctgtcatggttgacatttaaatttgttttccggccgggcgcggtggctcatgcctgtaatcccagcattttgggaggccaaggcaggcggatcatgaggtcaggagatcgagaccatcctggctaacacggtgaaaccccatctctactaaaaatacaaaaaatttgccgggcgtggtggcacacgcctgtagtcctagctactcgggaggctgaggcaggagaattgcttgaacccaggaggcggaggttgcagtgagccaagatcgcgccactgcactccagcctgggcgacagagggagactctgccccccacccccaaaaaaaaaaagaaaagaaaaaaaaattgttttcctgctatacatggtctgtaatgccagtggtatgtggctgaactgtaagtactctcatgtaaaataatccttaccaaagattgtcttatttttttattgtaattttcagttatatatttttaattgttaggttaaacatatgctgcgattgctatagttagttttttttttattttctgcacaggttatcagtcatgttccttaaaataagaataaaggcgatttgattctttgaatctgagttgctctaaaaatccattcaccttttcattgactcgatgtaatttgaaattcagcttaggctgttgacatcactggagaatgtaaagggttgcatatttatctttaaggttctccggaagaaacggcgtttagagcaacagatcgtggatctgaaagtgacaagcattttagaaaggtaagtgtaaaagagaattgttcatgtaggtagtcttgaaagattttttaaagtttttacttctttggaagattttaaaatgataacatctgagaagcaaatacaaaaacatccaagtagagatatcgttactaatcttagtgcaaagtacaaggtattacgtggcagttctggaaatataattgagaagcccatttctttcacatatgtccagtgaagcattagtttcgagggttgtccccaagaaagagttgtgttgttaagtgtgtggggggagaaaggctcgtttagacaaggcaagcggacttcttttctttccctaggacctctcatactgtaatatactcatgcgcattgtgaatttccaaggagtcaaagcatacagtgttttcccaaattatttatcaacagaacccttttgctcatggaacgtcgtatagggactagatttcactttggggaaactagaaagggaataggaattgggttattaggaaataaatcaattccctgatattgatagttaacaaagttatgtatggggttatttatggtatgttattttcaacacatattcattaacaaaatccatatgaaagttataggagaattgctgaggtagaataacatactttgtttgtatttataatactcatatatttacctgacgttttctgagtcttcacttttttcattcttttggaattggtaaaataactgattccttgaaagtttttttctaaataatacctagataatagatttatagaaaaaatattgtatgaatgttttaacattcatgtaatatggaacatgtaatttttatactggaggttattatagttttaatacatcaaagaaataatgtttattttggaagcagaaagaagaaataatttctatgaataggttttcatctctttccttgttcttcaactttgaactttttatattccaaattttaattatatttcaaaagatttttttcttttgccttttaattttatcttttggagaaaaatgtatgtcaaaatgtatgtacgtgtatttgtcttttgatttgatcttttttgaccctcttttgcattgacattattttaaccaaaggacactcttgattgttcatgctactgggggaaaaaaaaataagtagaaattagcctaatagttgtggcttattttgagtgaaggccttagcccttaaggcaattaaatttactgtggagagaagagctaatctaatggggagaaggagcctttgttacaggtgtggtagtgtggttctttgagtgacaagatttctgtttgccagattggttaggagaagtctgtgtgtctgctttctctcttatggcctaggatcactgtggtgaatgaaaaacctgtctcagggcctgactcagataattcccttaaaacccggctaaggtcatagatgaataatcagtaattgaacagaagctctgcaatagaaaagaagccagataattatttttggaaatttaattatatttacagattttattttatacagtagacatggaattaaatttattacattatgttctaatttactctttgcttgttttgatttgcttgtttgacaatacatgtccttgtaaactatttccttttaactttttctcaatttatggtgcttattttccccattaaagacttaccaattttttttttaactatttgttacacatactgaatctagagttgtaattaagctactttcattactggttaagtcaaattatagcaaatgctactataaaaatttactatccaaaaatgtgtctcaagccccaactgatggtttcaaattctgttattaataatatgcagcattgtgtttgcaaagcttggctgttacttgtgatgcttgagaatgatgagtcactcagctaaactgagtgattttgagacttgtgtacaaattgatggttgaatgtaagcatgcaaagagagaccttagcttagcagtaccctttttgaaatcactctgacatcaagtttgaaaatgtgggcaataatcagaggtggtaaggtggccaggctttagctgaatacttttttaactggttcagtctgagggctgaaagccccagatttaaacagtatttagaatttgaagcagtcaagtattagtttaatggttgtcaggtttgtaacaaagtttctggctagacttctactagaaatgtaaaagtgcatgtgaatcagctttttaaaaaagtaataataattgaaaaacatttctacaactagaactaaagaaaagatttgtcctttctaataggaaaacacatctggagaagtgctggcaactagcagaacagttaggaccattcagaatcaactgaagtgaaagtgacggggagctgaggggaacacagatagtttgacttcagtcagacagaataaacatgatgaaccgataacctgtgattcccagcctggggttactactggagttttaggtgtcctggaaagttataataccggtcttcaaaaagtctacagaaagcatagatttccacataatgctgcacaggctaacgaattaatcaagtttctttggtttggcctggatttatatccattcagtttgtggacactactgaattatttatgtcatgttgatcaaaagttctgatatgatttgattaatgaaacattgaaaaaaatagtaaaaccaaccatttttaaccttacactactatcttgaggtatgattgacatacattaaaaccacctcttaataaatgcttcttgttaatcaaaaatttgaaaacgtatgtccactggaggaaaaaagacatagccctggatgtgaactgaatattactgagactcggagaccttcagaactacctgaagatgaatcgaagtgctgcctactttagagaattggactaatttaatttgggagtcagcagattgctgtatatcagtcatcatatataccggtgacaagaccacttagttcattcccttttttagattctgtaagattattgtgttccagtgaaattgatttgcaaaatgagacattttattttctgtgcttttgttctatcatgtttctgattggtcataagcatctcacagaagtaagaaatatggcgattcagaaggcaacaagcacatttataatttatagaaaatatttgaaggactttttcatggcccaaatcatgaaaagtagtagtattgttttaagtataattattaaattataatacattaatgttctttcttgcaacatattactctcattctttttttttttttttttttttgagacggagtctcactctgtcacccggctggagtacagtggtacgatcttggcccactgcaacctctgcctcccgggttcaagcgattctcctgcctcagcctcccaagtagctgggattacaggctcctgccaccacgcctagctaatttttgtatttttagtagagacagggtttcaccaggttggccaggatggtcttgatctcttgacctcatggtccgtccacctctgcctcccaaagtgttgggattacaggcgtgagccacccagcagtctgattcttaattttatagtttatgttgtacctccccagctgaagtatctcttttcttttttcccgcgtgtttagtgttcactcatctttatagcatagctcaattgtcacttcatgaagccttccataacctttgtagctccattaattatattcttctgagtgtttaaaacacttgccatatgaaacactatttactttggcttacattcttactatctaatcggccatttctgttactaaatctttttctcagagcacctgggatagtcttgtgtcttagtaaaatcagttgattgatttaactcggtagagtagaggctgattaaagtaaataaatctggttgatgccaacaaaattttggtcccctcaattttttgctctcattacctgcaaattctccctggccttcatatttggcaaccattgaggagaacaaggctgtaaaagtagttcatgtacttgatattctgaattggaattaagcagagttgcttaagtaggacttgcttttctgggatttcttatgcaacaaataatgtagtaactggaaatccaagttcaagacactggcagattcgatgtcttttgaggacccttggcttcatagatgatgccttctccctatatccttacatagcaaaaggggccaggcagctctggcctttttttgtaaggccaataactccagaaacctcatgacctcatcacctcccaaaggccccacctctcaatactatcacattgtgaggctaggtttcaacatatgaattgtgggagacaaaaattcagaccatagtataatatttcaagattacttaaactcttctctaccaaactcattaacttttaggttagcacagtattttcattgatattttggtttctggagttattactaattttcttgatctgatgttataattaaaaaaaaacaggactttgtacgtgaaatgagactgagataaggaagctgattcagagatggagatttaaaaaaagagagatgagagattgagatctgcagtgtcaaactgacaatagccaggagtcaggagatattaagagactatatcatctgtgattgttaatgattatttattgttatttataaatactactgtattttatatattatatacattgttttaaaaattatttttgtaccatttcttgaaagaaaaatgtctaagcttgggaaaatatttattgaaaaatgtggtttgtacatctgaggagtgtatcttgcacagtaggtgcatagatttcttcctcttcctgttccacatggccttagcttagaggctgtgtggccatcacttggtatttagggtaagactggtgcacaaaatcaaagacaggtaaccttggtataagtgtagtatcatgtaaatagcttttctatgtctaattcttgttttcttcctactttttcaggaggtcaatttcagttcatttcaactatctttacataatagtgctttagtaacaggcatggaaggaaagagacatgtccctagagtgttttcttgaaatctaatagatgattggagtatttaccatgcagttgtgtatatacataagcagtgaattcgagaggaatttttaagctgtaaaaaaaagcattgtgtgccttatagacgcgagtgagaaatgtggaatatggctgatccaaagggaatgagttatctcaattgattaatcacagtcagttacagattgaactctttgttctactctttgcccccttctcactattgctcttgactagtcttaagaaagaaatgtggaatattttctcacggctttgggattttataaattagaatactagtggtatgtaaatacagcaggtacactactgtataaaccaacataggaagccttctttaaagggaattgtttgagaaatttgaacacttggataatttgaataaaggattgtgataaatgatcaaatgaaagaaaataaatcaggttactcttctttctgcttgataaagcaataattttttttaaaggtaaaaattatgagaatgatgaggatagtagttagcattgtctttctttgataggtttgttaatgatcataaaactgatttatttaaagacatgtctttttataactattttatactgttgtatctggaaacaaatattgaatttcatttgtcatgtggaagaaatcaactagttttaacctttgatttataataaatcaaccactttcatttattgtctaatactggcaatgaacacagcctaatgtatcaaaactaacagaataaaaattctccaagttatatccagactttaagacactttctaattatataaaataaaatattttgggcagtcattttttaactctgaaactatttaaaactcctaatttagaatatcttaataaatacccattttcctctttttatttttataacttggtaaaaattgagtccattgttttcccagaacgctgttcttaaacaaatggttacctccttcattagaactttactttttttaggatttctaattaagaaaacattaggcttgtaacattgtcaaatcttggtggtctttcttccacgttttttgaggtcgattatctaagaggccatcagttaataaagctatgcaggaaatgacatcatgccacatgtgaatatcctgtattaaaaattgtatcaatatactattttataattatgaagtggaatgaattttagaaatagaaaaggtgattttttgtgcataggtccaaactgtgttttgttttcatttcagaatttcataataactatattgtctccatatcttaattgtgtttttttatagcacttttgtttagtaatttgtatatgcttggctgtattctcagaggctgtttctatttaatgttgtcaaaacagctcataaaaagtgaaaattcggtcagactagttatttgatattatatatgaaatcaaaacaacctgaaacattatcttttaatttaaataaagaaccccaaattttaatcaaatgtatgcaaaggcacatagaatatatgacttaatgtacaacctttattaacttgatgatggaaacctgttcctagggacctttacttgaataaatgaaatatcaagaaaaaatactaacttaagaataataatttaataagtaagtaagctattatgatcttcaatcagtcctgagagaatcatggttgagaattagaaaatttagaccagtaagatcaacactgttaaaaaaaaaaaaaaatcagtattttttctccatattttttatatatctggatcattttatttagcacttattattgcactttccttttcactttttaaactatgctgttttatttttctgagacatctgatttactgaggaggaaaatggaaatgcggtacagagcccaagggtatgacggctttaaatgagtttccatttctgttttaagttaaccatccctccctagcttacatctgttcctttgttgcacccttggtttaacattattctcctccccaatttcctcttctcctcattgtgaactcgtggcagggtctgcttggtgagctcattctcttacaacaacaaattcaagagcatgaagaggaagcgcgcagagccgctggccaatatagcacgagctatgcccaacagaagcgcaaggtgatggatggtttaagggggctaccgatacattcacactaatcagccatttctgccaagatcatgtcacctcaatctgttcatggactccaaatacaagaaattaatttgacaaagtgaaaatataaaagatgcatcatataaatatgtaacttttctggagtgggtagtataggtaaagccaaaagaaacaaattcaagcagaggaattttggtttctgaaaattaggttgtctgtagggtccctgtatttatacttagaacaaaattaggaatttctgtttatgtggtccagttattgagtcaccctaagtttgtaggcatcttacctacctacttgctccccaagtttttatttctaaaatgaaaagcattgctgtagatgaccagtttacactaaagaataacatttatttatttgttttagctaaagtatatggacagggaacattcatattcttgtagaagaaaattattttgacttttgggcaaaagcatgtagttcttatacactttgacaaactcattgcgtacatttttcacattaatcaaagtcagcacaaataaattttcaccttggaccacggagggtttgaacactggaaatttgatataattctggttgctaaagaacaagttctaataaaagcttaagtgtataccaatatgtggctgttggtgcaatcagcaggtccgtaaaaatatgattttaatggttaggtaatcccacaacggagatcccaaagttcatgtttggaagagacttttgggtcaaagtgaaatcagtgtaatgaatttaaaattatactctgagatcttgaaatcagctaattatgttacatcttattagctcagaaaagttttgaagttatatacaaatgctagtcaggaaaaaagattcagtcatgtaattcttgtacattctactatttaaatcaaccaatattatagattatgatttagtgcagtaattctgctggctaaccttatctcatttggtggtggttagtacttcagagtactcaccatagtttcatttatgttttcagcatcacttcctggtttttctcaattccatggctgtggaatcaattcatatgtatatttagcttcggtgagcaaaaacatagctagaaaaagaaaagaagtgagtttcctacctggttaaattaaagtcgatgtgttaagccaaggaggacttcttttgaatggtactttaacaatccctgttctgtatactgtgaatatatcatttaaatagcctaataaattggatgcttaggctgagccacctatactttagttttgttatggaaagaagggagaggagcaagtatgttcttatatgttacttagaaataagaatgtagctgtagttacacattgttcttaagtttttttcgtaagacaacttgaaatgagtcccataggcctgctatttaacattctaagatatgacttaaggttaatgatgagcttttgaatctgacaattcaagagatatccataatgaatactgattcattttctacattgctgaaagctaatgttcattttaagcctactttagtagcctttatttgggcttagagatgttattcctctttctgatatttattgggttatctgtttaacccttttatatctccctttcccgatttgtaaattagagactggcaagactttttaccctgagtagagcaccaaacatggcttgtttctgcccacactgtagttaccttgaggggaagtaaatgggactttaaaagcaatttatgctcttttatagtgaaattatccctcttactatcccgaaagactgttaccttacaatatcctccactcctttccccctgtagttactatagagatgacttttcggttcttcactgccataatgatcaaaatcctaattcatgagatttttatcattccaggcatgtgaggtttacttgatgcataaaaccgcaagtactttttgttgttttttaattgttttttctctcttatcttcttgaaagtctaagtagatcatcatttttgatgtcttattagtagcaactaataaattttccctgtatcttctcagcaaaagaactcaagcagagacagaagattagaactaccattggtagttttgcttcctatggatatgttcacatacatagaaatttttacaatgacctttttatatatgtatttcagaatttcagaatggcctcaatgccttaataggaagaaatacttgaaatttttaaattagggcttggttttgtgaggagctagtaaaggtttttctctttcagctttagcttgtttctgcggaggattccgctctttctccatcagtttcatagccctggaattgtagaaaagctctggtttcaagaccattgatatccatttctgtcagggtgagttttaaatttatttcatgatgcaaacaatatattgaacaacaggacatgaacttgttcttgttgtaagtggctgaattttatcagtaaagcacatcaaaataaaatataccccaattgctagttaagacctagagtgacagattgaaaatagcttgtgttattctcttaagaaaatatataaaaattatcatctcatcaatctttaatgtttgttttataaatctaaatgtttttatattgtttcctaggaaatattaggtctaattttttactttaccaccagctgtcttttattttactctttttttgagacggagtttcgctcttgttgcttaggctagagtgcagtggcactatctcagctcactgcgacctctgcctcccgggttcaagcgattctcctgcctcagtctcccgagtagctgggattacaggcacatgccactacaccaggctaattttgtatttttagtagagacggggtttcttcatgttggtcaggctggtctcgaactcccgacctcaggtgatccgcctgcctcggcctcccagagtgctgggattacaggcatgagccaccgcacctggccagctgtcttttaatataacattatgattaattgtgatgttccattaaactaagcggagaggaaacatgctggtaaaccatgtgtgagttattcattgtaccagaaaggcaaatgatacattttatcctaaaattcaaatttataaacatcttaacacttgtgatcattaaatactactaatctagcatataaattatatttgtaggcggggcacggtggctcacgcctgtaatcccagcactttgggaggctgaggtgggcagatcacgaggtcaggagatcgagaccatcctggctaacatggtgaaaccccatctctactaaaaatacaaaaaaaattagctgggtgtgctggcgggcacctgtagtcccagctacttgggaggctgaggcaggagaatggcgtgaccccaggaggcagagcttccagcctgggcgactccgtctcaaaaaaaaagaaaaaagaaattatatttgtaatattctactaaccttatatcattttaactttttatataacttttttattttaccaaattaagttaaccttttatagcccttggcttatactaaacatcctaacttttttgtttaattgtattagtttttaagttattgccccagatgtcaagtaatgttggattttctataataatttaggatatattgcatgaagtcagttagtatttacatttaaaactaaaacaatttatactaatacagtttatacatttcatactaatttagctacagttggataaatatttaatggaacaaagtaaatcaaagtaccttttcaaatgaattggaaattaaatccacataacaattttttatgaccacactattacagtgtgatggcatgccaaatgatcataatgtggaattatgtatttcttcattggctttcaagattctgttctttagtttgtgggctcctctccaacttgcttgtctcctcacagtttaggcgactgtttataattcttgtccatcctgcataaacacacacagtcaaaatgaaaaaaagcttctatcagcagatctgtgcttgctgtacagaaatgggaaaacaattgaagtttgcattatcttttttctaattaccagatcgtttttggagctatttaggcatacgcttttaaggaaaaaagaaaaaaagagtgtaccttttgtttctaacaaaggttgttatctatattattgaaataaaaaattggggatagttatgacaaagtatttagaaataggaattaaaatcttaaaataacttttcatagcatggacaagacttattaatgtctacctcaataagcaaatcatttaaaaatttttcatgtatatttgctgccatgatgtgttgtgattgcttaaataaccaatgaatgaagatcaacaaggatttaaatgaagaagaatatggatttaactattttctcctgtgaaataagttcatatttacaagttttgattttcagaaattagacaattatttttaaaggctgggatgacaacttctgcctcttaccaagaagtcaaagcacagttatgtgaattcatcataaatcacatcatttttattatattttgtatttataattgtattgtgactactttaaaacctgttataaaataaaattgttttttaatattttattttagaattattagcattaataacaatttgaagtagtttacacaatacctgtgagttttatttttgttttatattgaaattaattttagttgctttacttggcttcattgctatggatgcattctctgtgttacgagttagcagatctttccttggaactgaatttaaaagcaagcatttggctccacttaaatctctgaaaatgcaacttgttctttgcatttattacataattcgctacttatggtacagaaatggatacaatacaaaaatatttccttataagatacactgtgaccaatgagctttttaaatagctgtaatcagtaacatgtatttgacttttcaaaacacatttctggagggatatcagtgctttatttccccaaatatctgaatccctatgctttagtacaaaacaacttctgaagaatttagtaaccatatgtgttgatctcttgtttttctaactagtctttcataagaaatgactagaatagcaacagggaaatgattgccttttaaggtttttgtttctcaatataaaattttggtgaaccatttttattgataaatacaggtatttttactttcttaaatcacttgatttaaaattactttgattaaatatgcatataaagtcagttgtttttaactctcaatacttatcaaaaaaatttaacttgctgtacattctgtataaacctaattctattcaactaaaattattttaaacatttaggtgtcagacaaagagaaaattgaccaacttcaggaagaacttctgcacactcaggtaatcatgatgactaagaaaaactagggacttttaaaaattatattcgaatgtaactttggtgatatggacatttattttttcaacagagcaaaatttggaaggtgtaatgatagaaccttattattatcgatagatgcaaaagctaattgagaaataaggaataaagacagaactagataagtatggagttaactcatttatatgtaaaaacctattttgagtgaatcttatgcccaaaagggagaaagtggcttgtccttatataaacttatgcttgcatttttacattgataagctaatacagttaaagaaattcgagttgagtctaccacatcgttctagtgggctctcaggaacctttactttgcttcgcaagtctgaaagcagtcagacaatgcttatctaaagctctttctggcactacttagaaaagctattttcttatagttggtgataaaattattactttaaggacctattttgtgcaatgtaatgagtgggtaacattctagtacaaaattaccctatcacagccaggcacggtggctcacgcctgtaatcccaacactttgggaggccgaagtgggcggatcacaaggtcaggagatcgagaccatcctggctaacacagtgaaaccccttctctactaaaaatacaaaaaattagctgggcgtggtggcaggcgcctgtagtcccagctactcaggaggctgaggcaggagaatggtgtgaacccaggaggcggagcttgcagtgagcccagatggcgccactgcactccagcctgggcgacagagcaagactccatctcaaaaagaaaaaaaagttaccctattactcaatcatcagtttttctatataggtgacactgacatgcattaattaacttattttttaaagttcaaagagttactatcagctgggcatggtgggtcatgcctgtaatcccagcactttgagaggctgaggcaggaggatcgcttgagcccaggagtttgagaccagcttgggcaacccggagaaaccccgtatctataaaaatttttttaaaaattagccaggtgtggtggttgtgcctgtagtcccagcaactgggaggctaaggcgggaggatcacttgagccccaggaggtcaaggctactgtaagccatgattgctccctggccaatagagcaagaccctgtctggaagaaaacaaaaaagaataagaaaaagagttaatcttggatctcttttttgtgaaaaagtgaaacgactacaagttgaatatctcttatctgaggtgcttggggccagcgtgttttggatttcagatttttgaattagggataatcagtcagtagtatgttttgagtcacaggtttctttggtatctatttattgagtctcaaacctcactatacgctagactcacctgtgctctgagtggcactatatctatgtttttaagggttcctagccaggtgattccaatctgcaaccaggggtaagagtcattggtcacaaagcatagcctctggagcacattagaaatgcacattcttgaccccatcccataccttctgaagaatcagaaactctgggatgaaactcagcaatctgtttttaaatgccctcaagataattctgatgcattctaaagtttgagaattattgttctagagctttgagagacagctcaatagcacatctcttcaggatggctacaaattggcatctgtaccaaaatgtttccatccccagaaaatgtagaccccaaaattgattttgtgtttacaaagaaatgagccagtggaaattctaccctcttatatgccttgatacaaacccttcaatttgtgcaattgtaattgtcagtcactaggcactgatagactgtattatggagaattcactgggttatctatatcaatgatgtccaatagaaatatacaagccacctgtgtaatttttaatttttacattaaaaaggggtaaaaagaaacgtggaattagttttaataatatatttaacccagtctatcccagatagtatcatttcaacatgtgatcagtataaaaaatatgaatgaggtattttacacttacagcacaacctcacttcaggccagccacatttcaggtgcttgataactacatgtggctagtagctgccgtgttaaacaacacagatctaatccttagatactaccagaattttgttaaatatactattactagatataaatgagtgagtttatgtaaaaatatgtttatagtagagtctagccagtagttctgcctgtctcatactatgtaggtgttcaattatgtatgcgttcttttaatttggcttgagttggacttgctgtaaggatagaaccatgatttcctgttaattactttgttcttgaaagattccaataagctaaaaaaattgtaaggaatattttttattataaaaggcatattataagttggacataaacattctgctggttgtaagaatgggttatttttaatagttttctctgtgttgttaatgtttagagaagaaataaaagctgggaagacaaattagaaaggatcaaatttatttgagacggaaaatgtgtagacaagcaactacttacaaaaaaaaaacctgtttagacatattagtcttctttaaaaatctgtttttatatgattctttttgattttggtgttttgttttgtttttttgtcaagtagttgcttggctacacattttccttctcaattaaatttggtcctttctgatttgtcttcccagctttttttgtcttcgccaggctggagtgcagtggtgcaatcttggctcgctgcaacctccgcctcccgggttcaagcgattctcctgcctcagcctccctagtagctgggactacaggtgcccgccacgacgcctggctaatttttagtagagacagggtttcaccatgttggccagaatgctctcgatctcttggcatcgtgatccgtctgcctcggcctcccaaagtgctgggattacaggtgtgagcctctgcgcccagcctatatcattttttgaaatagtaatatattatctctggacatggaaacataacaaaacatagaagagtttgagcctctgacagccctctattcaaaaccctgctcctctactaagtgaccttggtcaggctctcagatattcctcgctctttattcctagtctgtgtaattcctgctttatggggtttttgtgaaggctaagggagttaatgcgtttgcaccacttactaaggagtctgtcacataatgcatgcttgggtactgctagctattattttatagcatcttaattaaaatctaaaataatgtgaagaaagggaagaatttgaatttttgttaagtggccctgtaatgtgaagacttaaaattttgatataataggaaatactcccttctagaatgtatttaagaactacttctttaaattcttacgttttcactatttcaaaataattttttcaatgtgagtagcaaggaattttccaagtgaaattcttaattatgatagaaaattacaatgatttccactgtttgtaagagataatagtcattgtttattttattcctaatgttttcgtagatgcttttaaaatgtaatacattttaaataggagatatgacttcaagattttggaagattttaatttagacttaatactatttgataacccatcttttgcttatatagttacacttattattttattgcagttgaagtatcagagaatcttggaacgattagaaaaggagaacaaagaattgagaaaattagtattgcagaaagatgacaaaggcattcatcatagaaagcttaaggtattctaagtttgtcttgtttattctcaaaattttaccgcttaacgttgtgtgttcatcagtaccagtttctaaggagctgtaaagtattctgtcatccttttctttctaacctaatgtgcttggaggatggaggatctcttcctatattaagacattttataagttgtagtctccaaatacttgttttatactatgcccataaaatctttacacttttaagagttatttcgtgtgaatcagtttatttttctgaaatatctagtttatctctaggcttaacttttacataaaattttatataaaatcagaattgttaattgatggacatgtaagtgacttatcatcattgctttacttgtatgccagtgaatgattagaccactttcttcagtttttaaaaaattaacacttttcttctaaggagagctttcttaggcatttcaaagaactttcgaaaaagtgtgtgctggtattgttactatcagcacattggtgaacttatttaccaataaatcaagtcttactattccccacccaactaaaccacatgtgctaaattgaattgaaacaattatttaacttaaatctcatataagtaagcagagtttatatgtagcaaaactgcagtaaatcatggcatgtacattctgtagtcaaggtccaaagataatacagttctagcttaacaaacatgcattagtagctttgactataaatcatgactgcataaaacagataacatgactatttacaagtggcacttagaactgagaaaagtcatttccaagtgctaatatatgtagagtttacctcagaaacagtattttctctcataaaatgcagtggcaattaacattttttgtttatttttaggctggtgggttggcaattgcttgccatttaattttttctagggattaagaaatgaaaggacccttaagccatcattttgctcctgccttagcattaaaacttatccataattattaaatgcttgatggtacccctttttttcaggcctgtgtatttttttgttcattcattcatcaaatttacatgaagcttgttacacgcaatgcaaggcaccacattcatttctgattctacagcaagaaacgatacaggatatttgcccttgctacactcatatttcagcctgcccagttgtcagtggatacttaaccacccttactggtttaacagtcttcctggtttatcctttattcagatgcttgcttgcacgtgctctctgtcctctctctttctctctcatgcatgcctcaaacttagcaaagaataatttcattgtcagttggttacctgaccaccttttttttgcctttttggtgttaatggtcttttcttgcattcagtattagctcatcagtattaagtaataatttccatcttatttaattagaatgttaggaaatcctgaattaatttactttattaaatcattgtatctaaataaactgaatgagaaatggacttttaatctgtaccgttttagtttttacgatgaagatgtatttatgtaatttgagaaaacagtacaatgattatggaaaaacaatttgaatttatcacttttttctcttgacacatctgttatatttttttctttacttttactgttttatattataactttttaaaatttttacagaaatctttgattgacatgtattctgaagttcttgatgttctctctgattatgatgccagttataatacgcaagatcatctgccacgggtatgtgaaaaattgatagtgaacttgccaattagcaaaaaaagaagcagcttagcttcctaaaaattatgtgtatatatgtacacatacacatatatacatactagatgtaggcatttatattttttatgtaatcttacatgttccaagtaatgtcttaagcaatattatttgactattttagttcattataaatattaataaatataagtacattatatttatgagttactgtatgtgttataaaggaagatatttggctttatatgtcttaatattagtaatatttaaatactgaacagtggattaaattagccatatgcgtgaaatttaagctaatagaattgaaaatgtgtttgtaaacagtaaactagctatggaaaagatttatggaaagttaataacctggttttagaaatactggtttaaattagcacaagtttttaaaataaaaattaggctataaacagtggatccagttatagttttgctgttcctattttcaatgtgcacacatgcatcaatcaccatttttttacggattttaaaatattttttcacctgtagaaattttaaaagactaaaaaactcagagcagcattacaaataggttttaattttaatttggtatcagaaaaatatgaataagtgttctttgttttgtgggaaggttgttgtggttggagatcagagtgctggaaagactagtgtgttggaaatgattgcccaagctcgaatattcccaagaggatctggggagatgatgacacgttctccagttaaggtaagaacataggccgtctcagtgaggttccttaggagagtaactgcttcagtgagacctgttcattgtgttgaaatgaggacttttaaccaaagaaagacttgatacatagtgtttggaatgatccctagtgtggaaatcagtagaaggcacagccaggaggccagtgtggcaggagctgagtgaggggagagtggtaggagaggatgacagagacccagttgggaggcctttggattttattctgaataagataagagagaagttaagagaatgagaatattggaagtggagtcaatgaatatagataattttctagttttattgtgacaaaagagcagagaaatgaagcagtagcaattgaatattgttgaattaagggaaggtttttaacccttttcctgtttagaaaaaaagtgcagctcaacaccagtgctcatttaattttacgtaaacacactctctgaagctgaagcaaatctgactaattttcaatgtgaaaataaaatataaaaactgttcttagagttatttctaaacagtactaacatcagaatcgtcccaatcatcagaatgtctgttttttaaaagtcagatttatcaaatcaatcttcggccaacaactttttgagaatgatgtaaacatcacacataggaattccgcattttctaggatttgacattttcagctattgaaaattactatattttgtaaatggacgtaccgctactaaaaacagaatgcttgaaatagaatgtcttttgtttccaaagtcagtacactagagctatgtgaaaataatcataaaagtgaagatattttatggcagagttatgttggggcaaatgctgcagctgcaagcggtgctggcaaatattgtcggagcaagtgggaaaaggattaaagatgtttatatgctgattataatgatctaataaaggggggaaatgatgcaagagagagggaaaattgcaagagcaaagttactgaggtgaaggagattgtgacttggtgtactagtccatatctgggagcactgacaatttctccagggtcacaggaagaaggtatggggctgcagagtctttcattgaacagatatttacggaatgcttaatatgtaccagtagcattctaggcaatatgttggtaaacagcaacaacaaagaagaaccttgccttaatggagggtatgttctagtagagggagacagataatagataataaatataatacataattgtatagtaggttagaaggcaatagtgttgtacaacaagaaaaagcagaaccaggcaaggagaatgagggtgccagagtattcatagattgcattgataaggtggcatttgaaccaagatttgcagaaagtgagggagtagtcctgaggatatcctgtgttcagcaaggagaatagctgatgcaaagcctctgaggtggttgtgtggctgtcatgttcaaggaacaacaaagaggcctgtgtggtcaggtcggggtgaagagctagccatggtcggggcaaatgatgacattagaggaataatgaagagcggggaggaacagatcaataaggccttataggccattgtacagacttccgttttaagtaaaatggaaagccagtgcaggatttcgagcaaagtaacaaaagtgccttttaaaaggctgctcttttgaaaatagttgtagccaagatgtagaaccagggagtctaggctactggagtatccaggtgatacttgggctagggaagtagcagtgaaactggtaagaaatggatagattataaatgtgttttgaaagtagaattaacaggatttcttgacaggtttgatatggagaggggagagaagaaaagcaatggggagagagagagagagtgtcaatcatcaatgatgcctccagggtctttagcctgaacaaattgaaggatgtagtttgcatggaagtctgtcagtggatcaggtttgggggaagaagatcaggagttcagttttggacttgctgagtggtgataacaagcagttgggtatacaagtttagacagaggtgtgggccagagacatacatttaggagtcatgatcaactatctaaaagtagtatttaaagtcatgatcttactggagaagatcttcaagggagtgagtagagatagagaaaacacagaagcaagcagtatattctgggcactctgaacattaagatgttgagggaagagaaaataacaaaggaatgtgtgaaggcccaaccagtatagtaagagggaaagcagagcaggacagtgtgcgcaaagtcaggtaaacaaaaagaaaacatggaggaggagggagtgctcagtgaggtcacatgctgctgatccatcaaggaaggtgaacatagaaaccagtcgttgagttcaccagtggaggcaagaaaggggaacgtgtggaagtttccttctgattgcttccgcttactcagtgaaatactaagccagatgatcagctgttaattagaaaggagaagagattaaagactgaggcaggaagaaaaagtgaagtctgttaacagatcgtggtgactctaggagtgaatcagtggagaaagtcaagtgatattaggattactgaggtggactgaagtccctttaagttctgtggacataaattttaaatgaatcattatgattgtgttttgtttttttcatgtttagctggtggggggtaggtgtagaataattggaagattgaaattaccaagaattatggcaagaatagtgggagaaagacagtgaggctgatgctgaaatcttcaagaaatgaaatctgtttacaagtgcaacagggtatgggcagcctagtgtgattcatctagattgcacttttgtgggtctagctatggattgaatcgtgttatgtgttactagttctgtgtgtggtactgtgtgactgtaccagactttacatatccattttactaccgatgggaatttggggtacatctaacctagagaaaaaaacaaaatgaacctcagactacacctcatatcctgttcaataatcagttgtaaaaacatgggagagaaacctaccttttacattgttactagcatcctaattgtagaagctgtggatgatacttcaagaagaaattaattttgttttggcaggcagggtgtggacaggtttccttgaaacagatgaggctggtctctttccggtttgtcattagtcccttagtgtttactagagcttctccttgaccaaccctgaattccagttttttgtttccctagagcagtgaaagtgccaaaaccccagcttagcattttaacctccttagcagcttctttctgcttggtttcctaaaatgtgaatgccgtgaaaggaaattgtgcgcaggatgtagggttttgttttgttttggaggtttatttctgcagttcatttttctttgggattgtggcaccttaagacgtgactacttaataactcggaattccaatcttgtctactcaacccagtgaaactgctacacattttaagtttttctcttgggcctttgccctgtgctacaaatcagcaaatcctctgatggaaaatagctaaacagctttccaacagctgtttattgtttttaaatttagcctgtttagctaatctcagtagaaggaattgtatttttaaagtaaaataactatagagaagctagaaaggtgtcaattaggcatttagaagttcttgtgaaaccactgactgttaatatacattgctataacatttcttggctgggtgcagtggctcatgcctgtaatcccagcactttgggaggctgaggagggcggatcacctgaggtcaagagttcaagaccagcctggccaacatggcgaaaccctgtctctactaaaagtacaaaaaacttgccaggtgtggtggcgggcatctgtaatcccagctactcgggaggctgaggcaggagaatcacctgaaaccgcgaagtggaggttgcagtgagccgagatcatgccactgcacttcagcctgggcgacagaatgagactcggtctcaaaacaaacaaaaaaacaaacaaaacaaaatttcttacccaaatatcactccttgagtgaagcctgtcgtagctcccttatcatcagttccattctcttctgtggcaccctaggttttgtcactctcttctattatgtctgtgtatatttctcccagcatgtgatgaggtctaaaactgggacagtcagctctgtgtttccccacctacaacacctgacacatagttcactctctatagaggttgaatgaatgaattgtcctttacctaaattcatctttgaggttaaatgcaaggtttccttttagtgtttcaagttttagagagatgattttgggcttagtgctgtgtatagcattgactggggaaagaaagaggcagcagcattttaggtcataagcgatataaaggaaccagcattcttgttgggaaatcacaacatatatgacatatatacaaacaatacaaatacaaaattattgtcttgtcagaactaccatgttgacagcttcagggggtgccccagcagtagtgtgaagggactcttggatttgtgcaatgcagtagccctgtctagaccacatacgggctgtgggaattaatattacttataaatacatcattacctctcagttttctgttactatcaggtgactctgagtgaaggtcctcaccatgtggccctatttaaagatagttctcgggagtttgatcttaccaaagaagaagatgtaagtaaaattcatctaaggttgatatgtgtaattttataacctggatgagcttataaaagacagttaaagaatatttgtgaattaagattttcttagattttcttaggattttgtgttttccattagcttgcagcattaagacatgaaatagaacttcgaatgaggaaaaatgtgaaagaaggctgtaccgttagccctgaggtaagggttgcaattcatttcagtgacgttttatggaaattaaatgtttatgatttcaaataaatcaaaatctaggtattgatgtttagattgctgctatctagatatgtagagcttttaaaaaaaaatccaaataatatatcattttgtgggtaattttccagaataattacttttaggatcagagaaagaataccatttttgtgagcgtcttatctgaatggatgagatatagaatttttagaatacatttcaccaaaaaaaattcttgacaaattccccccaaactttagcattgttttatttttatttttcctgagtagaccatatccttaaatgtaaaaggccctggactacagaggatggtgcttgttgacttaccaggtgtgattaatgtaagtatatacaaaacatgtattttattttattcttattgtgtgaagcatttataatgacatttaaaacctttttctttaagactgtgacatcaggcatggctcctgacacaaaggaaactattttcagtatcagcaaagcttacatgcagaatcctaatgccatcatactgtgtattcaaggtaaatcatatcaaaagattttaatgtactgatatgttttcttctttagcaatccaagctttgcattaaatagtttgtgttatgtaaacatacaagataaatgcatttttgccttctcttcgtattcattttattagtaaattaaattgaagttgaaattattttgataagttttacataagcatcattgaaatttttatcggctaggatttctttttagtaaataacgtaaatgtattaaaatctttcttgctataatgtagacacaggggtataatttgtactgagttttaaaagtctactttacatcttaaaattccacagtgtcatttttttatttttttcagatggatctgtggatgctgaacgcagtattgttacagacttggtcagtcaaatggaccctcatggaaggagaaccatattcgttttgaccaaagtagacctggcagagaaaaatgtagccagtccaagcagggtgaggtcaaattctttgttgcgagaatagattctttgtaaaagctccagctgtgatagggatttgttatttaaaaaaacaacaacaacaacaaaaaaacaccttacaactaagatttattacaatgaaaggataaagcaaaatcacaaaaggaaatggtacatggtatgaagtctgaaggaaaccaggctcacgtttttccactagttcattcccagtagactctactgggcacatttaattcctccagcaacaagctgcttgttagagactcagctcctaaggttttcatcggaggttagtcatttcggcaccctcatgtaccaaaattatttcatactcccaaaaggaaagcatatgttataattaaaccacattacttcagtagtgagccactgttatataaggaaaggtttatatcagtgtagggaactgtttaccagttaagttttcagataccagccaaagacaggcaggcctttttaaggacagtagtctcaggcctgctgtgttaacccttttctaggtagccaccataacctctgttctgctttctttttaagggtaaggcctgccgtggcattaatggttctgatatggagaaggggagaagtgaggtagaaacaaatttctgtggcctcctccccatctttcttcattcctttcatttctttcaactctaggatagtgagtttatatttcttctgagatgcaactgaagcttatttcagtcctttttgtataaaagattcagcattagcttaggtgtaacttgtcttaaaggagggattctcatcccattattaatctgaatgggcttcagggggtagaaactctaacatatgtgaaaggtctctatgcaaatatgcatttttctgggtacatagtctttttttttttttagtcacatttagaaatggatttttgatcctaaaagagttgagaagcagtggatccaaatattaaagaagaaggtgggaggggaggaaggagtaaaagaagacaatccagcttggttagaatttagatatttgaagaaagtatggaaaaataataatagctaccatttattgagtgcttcatgcctggcactgtatcatattgtcccataatctcaccaacctttttgaaaaaattaagttgtttacttaaggtcgcataactactaggcagcagagcaggaattcaaactaaggtctgtctgactttaaagaactacacatcattccgggttttcgatacgtgtgttttaataatacattttcaatgtagtaaaattaaatgtatttttttcaaatagcaatggaaaaacattttaaatgcttttgtgcagatttatttaactatatacatgtatagcattattttgctttctaaattgtatattacgcttttaaaacttatgtaaactatatctcacattaatttttcccacttttaaaaatagattcagcagataattgaaggaaagctcttcccaatgaaagctttaggttattttgctgttgtaacaggaaaaggtatgcaaagatggattataataacttatttttagtttctgttgttttcaaataataaagagtaattttcttgatgaaaatttgaccatcattcttccccagggaacagctctgaaagcattgaagctataagagaatatgaagaagagttttttcagaattcaaagctcctaaagtaggtatcttgttaaaacatttaaacattttacagtaagagagtagcttaaattgaactgttttcacttaaaacatcaggttttataactattagtttaacatcggatttctagaatttttcccaaatagtgaactgtatctaataaacaagtccttagctactttttggcagaattgagagcagtttatcacatggtacaatacatactggcatgcttccttggacgtgggcactgaaagacaacatagatatctgcctcttactttattttacttataaagtggttttagaaaatcgacgctttcacttttaaacgtgtacatatttctcttacagtattggggaagattggagtggggttgtcgaagaagtatccctagatatatattgacaggagataagataagcaaaaagagctaaaggccagttgtattactgtatactaaaactttatatgttgagtttctggaaatagaaaagtatgtttgttcctaggttagtacggtaagtcaagatagttcttgcaaaccataatcttacgtgctttggggagtgcactgacaacatatagaactgtgctgtctaatatggtatcactagttttgtgtagttattaaaatttaaattagttggaattaaattaatttctggaagatggctttcttcatgttctttttaaaggcatggtggctcacacctgtaatcccagtactttgagaggccaaggcaggcggatcacttgaggccaggagtttgagaccagcctgtccaacatggtgaaaccccatctctactaaaagtacaaaaaaaattagctgggcatggcgatgggcagctgtaaccccagctactcaggaggctgaggcgggagaatcgcttgaaccccgagggggtggggggcggaagttgtagtgacccaatatcacgccactgcactccagcccggacgacagtgcaagattccaattcaaaaaaataataaaataaaatataacattaaatttaaattagttaaaattcaacaaaattcaaaatacagttcctcagttacactagccacacatttccagggctcaataacccagtgtgccagtagctaccgtattggaatgttttcctcctcacataaatttttattgaacagcactggtatgaaaggtaagagtggctgttagcaagcacattcgcagacttggtggtagtattgttgtcctttttgtcattttaatatactttagctcttgttatttttttttaataggacaagcatgctaaaggcacaccaagtgactacaagaaatttaagccttgcagtatcagactgcttttggaaaatggtacgagagtctgttgaacaacaggctgatagtttcaaaggtaagttggattttttaaagaagcaagcaaattaagacattttattagctggcaatctttggcatccatacgattctgtacttctttcctttaacagttgcttggtagttcatttacaattagacagtatctggaaaatagaagaatacaaaccttcagttgttatacaagaacaagatttttcctttcagaggaaacatctctagaaacacatttgcagagttcaaacagatgagaacatttgctagtgcttggaagtacacaataaactatagagaattctagattcaccctgttgaggatgaaggagcagatgtgttgggaagcagagccctctgaacttcctttacttggcaccatttcctgaatcccacactttcctgctcagtgtcttttatcggaagagaatatatttgctttctcttttcccatatgtaaatcctacctgatcctacctatttatgccagttagtccctctgcaatcttgtattactttcatttccattttacagaagaggaaacagaagacagttacttacccaaataacttatcctattacccagtgtcacacaacatgggtaataggcccaggatttggctgttggtggtacaactgcagagtccattctctcagcagctctatggtactaaactacttcagctgtgtgctaatggatttaacatggagaaactagaatcagggagaatagttttgaaagctattgcaaaaatgaaattctgagacgttgagatcccagagtactaaggggtcataggcgcactctcagaaattcagttaatacagaggatatgtattttaaccactttaaccactacatctggaaagaaggagggtcatcaaacttgaacttttccttcttcctcagcaacacgttttaaccttgaaactgaatggaagaataactatcctcgcctgcgggaacttgaccgggtaatatttggatactcgtgtattttgtatatatcttaatttaatgttgtttgctaactaaatttatgttgagagaaaaatctgataagctaaagtactttggttttgactataactactaatttgtaagaatacatctctaggagcagttatctctttcagtaatttaaattatttattatataacattaaaaatggattataagatgtcaaaacaagtgttgaaagtgttttctgagaaggtaatgaatgtgctttaaaggttttgtagaattcgtgtattcctgtaatttagtgggaattaaacattgtttttccttgattttaaaatccccattagttaataaaacacagcattaatatatagttactgatgtactaaattaatatgtattgatgctttcacataacgtgaacaagtgttatgtgaaaaactgcattcaaacttgagaaggtagatatttatgtcagtttctttgtccttatctgcataatggcattcctaaaaaaaaacactagaagtgcatttttgctagtcatgtataattaaacccaaattcagcctagtcaaaaacctccctttggttatctctgaaaatcatgacagggtaaatttactgtcttatggaaatcttacttacttgtatttatattgcctagaatgaactatttgaaaaagctaaaaatgaaatccttgatgaagttatcagtctgagccaggttacaccaaaacattggtaagtatttgatattaatctcttttctgaaagactttactgtacaggttataatgaaatgctaaaacttagattgataaagcagtgatttattgttgccttggctcataggcaaaaacgtaatagtatatttttttggcaatatctaactacttttgtagtctaaccagttgaatttcttcatgttctttttaaatcttgattctctttgccttttctttatcttatacctaataaatacgtaatcatgatttctgtaaaatcctttgggcagaagttttgtcaaattatactttaggtaaatatcaacctgtcaaaattgatttataaagggagttggtatatattttcaggttctccattctgagtaagaacagttagtgctttctgtaacatgtggttaatatgttgtatacaaatcacattttgaacttaatgctattaatacttgaaatttttaaaaatagcaagtaaatgcacctttttgaaaaatatgttaatcttttctaaggcaaactgttaccttcagtttatattttatgtaagtttggccattcctaaattcagtggaatgagacacggtaaaacaagctatgtataaatagccttgacatttttgtagtcacatgttaattaacaaattcctcatgcagaaattatctttctaatgaagactgtggtatttttaagaatttatttttggagcagagctatcctcactgccattcattgtaaatattttctgtacctagtctattcactcagttaaaggttatcaaaagtgagcctagatagtagtatctggtctgtttgaattcagcatcactagtttcctcatttcagtgccctttcttcctcagtggtgaaacctcttctatcttcaagtagtccacatttgcctgtttttaatctccgttccttatccaaaaaaagagatctaattgtatctattcttgttgattaatcaaacattgttatgacacaacttatgtttgtttatttgtatcttagcccagttccatggctttgtgtcagtcagctttcaagttacaaagagatatataggtttacagattgagtataatactagttgccttgctagattgtatgagggcatttaatgtatataaaagtgatatgtaaactgtaacaactaataatgctgtttatggggagaaaatgtggtccttctataaattaatttttggtatcatcaaatggaaaggttagttttgtttggacagagcaaccctgaaatcaaagtatttcttcactaaagtgagccttgaagataaatgtaatttatttaatacaaaggtaactgaagagaattgtgaggggacagtgaacgcataccaccagattgcccattgaaaaggcaacggtcagatctgggacatctggctgctagagatttacttgtgtaagctgccggatcatatatgattctctgtgttttcagactgtagaggctgaaaaaatgttatgttaacgcaaatataaatcagagtagcaggtccaagccttagctgttcataccacattgaattcaagtacattacaccccaaatattttccacatattttattattttgacatagttgatgttgtcttgaagtttttattggtatctttttgctgaataatcctatgtgatattttaggacactgcctaaaatgtttacaattatttaagtcataagactgtttgatctatatttggttatctggaaagtgttaaaagcattttatgtcataacatgacagtttgttatttcctttagacattccactgtccttcagttaagttttaggaaggttattaggggtatagatttgacatataatacattatagtaggaaatactcactcagcatttttacgctgtgcctggttttcaagagtgaatcactgacattcagaaggagatattgatatatcattaacatcatgtgaccagcaatgtagacatatcttttctagaaggatagctggctagcttcacagaaatacattttttctaaaaatgctactatggtacatttttagaaattctcggacttcagaaatcaaagatttgcaatatcataatttgaaatttaaaacatgaataagtgttaaggcagaggcaggaatatggtaagggccacgagatgagaacaagaaaggcgacacaggtagctgtgtcctgtggctttaacataaatgggggcaagaggcaggagataaaacagtagatgtaagcaaaatattgggtttattaaccatattcagaagcttagtgtgtattccataagcagtagggggagggtggtcactgaagaggattaggtcaggtttgcattttagaaaggtctttgtagtaggcaaaatggaatacaggcggagaaaactgtaagcaaggaggcagttggcttttgcaataatttaggcaagatgtgatcatggcttaaacttggatagtgagtggtagtacaggtagagaagagacacttgtgagatacttgagaggttacctaaaagatagaattgacaggatttagtgattgtgtagataatgaagagtctattaaataatgagtatgtttatattcagtaattacattgctaggaatatatgcaaatgatatatttgacaaagatgaacacacaagacctttcaccttgattttttaaataaatgtgaagaaatggaaagcaatttatgtgtcccatttggaattatatagtatttggtttatatagagcagattactgctctatggatagaagtagcctttgaaaagtataggatgttgacatggaaaactaaatacaatatacttttagatttaaaaaagggatttataaaacagtatgtataattatgaaccacttgtgtaaatacacacaaatagttacgtagacataatttttttaataataaaaccataaatagtggttatcttataaaagaggaactatggggtacttcttacattttctgtattggttgaaattattatatggagtataatagtcctctactttaaaataaaaaaaaatccattttaaaaagaatttaattaaagtggaatgtaggtaaagtttctgtagataaagaaggcaataaaactattacctttattatattttgctaattatattttgtgtattagtagaagttatccctggttgatggcaaaacctggaatagagaagtcacctataataacacagaatatagtccaggcacggtggctcatgcctgtaatcccagcactttgggaggcccctatggtcggatcacttaagctcaggaattcaagaccaacctgggcaacatggtgaaaaccctgtctctaataaatatacaaaaattagccaggcatggtggtgcacgcttgtaatcccatctacttgggtggctgaagtgggagaatcgcttgaacccaggaagcggaggttgctgtgagccgagactgtgccactgcacttcagcctgggtgacagagtgagaccctgtctgaaaacaaacaaacaaaaaaaaaaaaccatagaatataggctgggaaaattgttagatgatagcagcaagcaataaggtagcagatgacataactagatgaagtggcttcacagtgtaatggtttttatatgaacattgagaactgatggttcagaagagagactggggtgaggaggacttaacttctactttctaactctgaaggccatttaactgctgaatagcttcatctcagcagaatttgaggacagaggacaatcactttccttaaggaaaggtttggaggtaagaatagggaaagagaatgagagtgtaaaatggtttgtcatggaaccgggtattacaggagcacaacagaaattgttgggatggaggggagcagtgggagtctgagacagaggacagcagcttggcgatgaaaggcaggagaggctgggcaaggagaagtgataacagctgcatctgtggatgtcaaagcagcaacctcccttgagaaagttgcctttagcttctcgggatttggtaatcaggattttaaaaagggtgtcagggatatggattcctggcccacagactccagggaaaaataacagactatgtctcttctgaagcaggatgagaaaaaagccctggaggtcagaggctggatcctggtcttcagttcaactttcagtaatcttcttgagattgtgtataaagtggtatctgaagaggaggccctgacaggctgcttttcttcatcttgctccttaaattctcccactctctgtcattaactcagtgactaaattgtctttgtccttttgggccccagtcatatatcctcctcagactctgatttctttactggttgtaactggaaagtgacctgaaagttagcagtgggaaaccaggatctgtgttgattgattcagtagacttaattttacacaaaatgtttagtaaatagtcttggagggtaggagatgttgactctcctcaccagagaagttcagctgggcttttggacagcaggatatttctgctaccctgagatttgtggctatatcctaaagggttgagattattcttaagaaggatcccctgataagcagagttttttttttatattgtagtattctaagtttattacccaaataaatatttccttgagatttcaaattgaaatagttgtatttttttattagtgacccatgttcttttaagatgtctttcaaggcagaattttcaacatgattatgcatcttttacattgttaccttaatcatgaattattgaaaaattttatctacagcattctataacatctctgtgctgtgatctgataagttgtcatatttataccaagaaattttcagtctcagactctcccgtaagcacatgaagtatatgttaatactaggcagataagtgtgcatgaaaagatgctcagaattattagtcattagagaaatacaacgtaaaaccacaatgaccactataaacttactaaaatggctacaattttaaatgacagactataccaagtgttggcaaggatgtagaggatctagaactctcattctctgctagtggaaatgtaaactgaggcaaacatttcaaaaaaaaattaaacatgtaattaccatatgatccaaacattccactcttaggtatttacctaagaggaatgaaagcatgtgttcataagaaagacttgtacgtgaattctcatagcagctttatttgtagtagccaaaagctggaaacagcctaagggtctatcaacacaagaatggataaacacattcatgcaacataatactacacagaaataaaaagaagtgaaatattgctagatgcggtgtctcacacttgtaatcccaacactttgggaggccaaggcaagaggattgcttgagcccaggagttcaagaccagcctcagcaacatagtgagaccccatctctacaaaattttaaaaaattagccaggcataatggcgtccacctgtagtcccacctactcgggaggataaggtgggaggatggcttgagcccaggaggttgaggctccagtgagccatgaatgtgccactgtactccatccagcctgggcaactaagcaagaccctgtctcaaaaaaaaaaaaagtgaaatattaatacatacaacagcatgatgaacctcaaaataattatgctggagtggaagaacaaagacaaaaaaagagtatatgccacatgattgcatttatataaatttctagaaaatacaaagtaatcacagtgacagaaagcagttccagtggttacaacttttgaggatgatggatgcgttcattatcttgactggtgcgatttacaggtatatacacatgtgaaaacttatcaaaattttaaatatgtacagtttattataagttaatgatacttcagtcaagctgtttttaaaaacaatattatatttagatttggtgcttttgatacttttttatttcagggaggaaatccttcaacaatctttgtgggaaagagtatcaactcatgtgattgaaaacatctaccttccagctgcgcagaccatgaattcaggaacttttaacaccacagtggatatcaagcttaaacagtggactgataaacaacttcctaataaagcagtagaggttaggatataatttaattaaatgggtaagaagcattatctgaagggagtaggagctgtgaattttagattttattcccatcacagcctctatctttcttttaggtctttatatctcatttattctttattcctcatctctgttttgggactaaccttaatgttgctaccagttactacggttataaaaatttactaattggtatgatgttggcctgagggtattggtacttcttccaaagacaatatttaacaagcaaattttgcttgaatatgaaatatttgcttgagtatttgcttgaatgtgaaatattttgaacattttctgtggattctgtggattatagagattccataaagaaaatacttaatagatgaagcatttcatctgagctcagttatacttaaattatcattttcttaggatcctgacagaagattaaactaggaattattaaaaaacaaaacaaaacaaaacaaaaaactaccttaaagaatctatttctgctaccatgtatcttggctttatcacttaatagctgtgtgatcctttgcctagttgcttaactttcctatgtgttttttcatctataaaatggtgacaataatgttgcctacctcacagcattgttataaggattaagtaagtaattatatgtaaaatacttagacaatgcccagcccatggtaactgctcagggaatggacctgctgttattatggtcctcatcatctgaattgatccatcatgtacatcaccccataaacagcgattgttcaagctaagagtcagtgtgtcctgtgcttgtgtgtgaggttgctcacaaaattgaagtcaatgttaaaagtaattttgtttttcatacctatcttaaaggcagtgtcagtttctaattattcggatgtgatttcacccctttcctatcttgctccagtgttaacttccttatctctgttctcaatttcttcaagcccctttctaagaactccagcagcctccctgcctaagttgcacgttgctgagccctggcagttcttgacacatttacccctgaagaagttagagagctgctgctaccccttcagtagctctcattactggcactaacattttttctgcgccctgtcccatgataggatattttcacatcctaaggttcaagcagtggaagtggttatgaaagcatcaatttttctttccactgctgctttctgtccctcagcactaggtgtcatggaaagaatgtagatctggtgagaaggtcaggaaacatggatcttaatactcaccccaccactcactccgtatttttggacagtcactttcttttttaaaatgagagagggctaaaatccagcattaaaaagcccacatagttataagtagattttgttcttcattatttttgacactgtgctcttcctttcaccgttcagatcattaggagttagctataatacaaagctgaatactcttcggctatgttttaaagtgttggtgcattgcttcatatctttgcttaaagacaaagctatgaagatgactgaatcattaagacatttaaaaccttttgcagtgtgaaagaagcagtcagactcatgtcttagaggttgaaataaataaatgaactaacttgggtggcaggcttagaatacataccttatcttgaagagacagccctgttcagctacagtaggtggtgtcatgtaggaatatgggtatatccttctcagttagtccaagagaagccgtaaatgcagacttttatatgaaatctctcaatttttaaatattagcatgcaattttaaaaatgagaaccgctatacatgtctaggaaaacataccaggaagccatatctgtccccagcaacccgtgtgagacctctacatcatggtttatatttgcctttttgttaatgtagtttcacatatattttctgataagctgatttatttatcacatctgtttggcttgagctcgtgttatttttcatgttaaccattgaagtatgtagtaataatatggctttttttctttcaaataattataggttgcttgggagaccctacaagaagaattttcccgctttatgacagaaccgaaagggaaagagcatgatgacatatttgataaacttaaagaggctgttaaggaagaaagtattaaacgacacaagtggaatgactttgcggaggacagcttggtatgttgtttgtatactggggtatcagcctcatatttttatataacttctcaaattgatactttttcataggagactttatatgactaaattacattctgaattaaaaataatgaagtaaagaaacagatttatgatctgtaatctgccctttaatatttccctgcccttctaaaatcacctgttgctgtttctttcttggctatcatttcagaaaaaagtaaaactttgcagtaaacagactctgataaacttctacaaattgtcatctgttagccattttatgggcctgtctgtagataggtgcttctaattttaccctctgtgataatgaaaggaactacatgcgttggttttcagtggattataaaatgttagacgcctaaaatcataacaccagctaccatgtattgaatgcttactatgtgccaggaactctgctaggtattttgcaagcattatttgatttaattcttaaccactcctgttattgtcattgacagagctgggattcaagcccctctctaatggcaaagcctggttcctgacaccacctgataaatcttttgttatgtagactgctctcactaccaaaatcaaatctgttaagtgcctgctgtgctcagagagttactagaggtgttgttgaattacaggattgagcgattttctgggaaaatgcagagctggttgtaattataattttgttttaaagaagtgtttgtctttatggccgggcgtggtggctcacacctgtaatcccagcactttgggaggccgaggtgggtggatcacctgaggtccggagtttgagaccagcctgaccaacgtggataaaccccgtctctactaaaaatacaaaattaaccaggcatggtggtgcatgcctgtaatcccagctactcgggaggctgaggcaggagaattgcttgaacccaggaaggggaggttgcggttagccgagatcgtgccattgcactccagccaaggcaacaagagcaaaactccgttttcaaaaaaaaaaaaaaaaaagaaagaaaaccatatttattcttgttaaatgccttattaagactggcttactgagaaaacagcttcatttttattcatccaaaaattataaaatttggaagccaattttcaactgtaataaataacttttatgattttatagaccttttaaatgtctaccttattacttttttcgttgctgttaacactgggaataatggttaataatttttttctcctcatttttgaaaaggctaacatgtaggtcacatggcaaaaagcgatgaacatgatctgaattattaaaccctgaattttaggtttctagatgttgcatttcatgtagttaaatttgtaatattttgtataatgtaaatgtgtaatattacccacgcaccccatatggttagcttgtttaatttgggccaggagagaatctccactctttattttttagatagcaagctaacaaataagcaggcaagtaaaagaagcttatgcatttttataggaaggatatatttttatgctggtttatatacatggttatttttccatatttactaagctgtcaatttgaataaaactactaaaatgatgagatgtaaaacaagttggctttttctcttcttgttattttcagagggttattcaacacaatgctttggaagaccgatccatatctgataaacagcaatgggatgcagctatttattttatggaagaggctctgcaggctcgtctcaaggatagtaagtggagacacggcttattgagttctgagttcacagtggtgaaggagtcatccaactttagtgaacatttgtagaaatagattgaacatttcaaagtctttgtcattaatactatagtcgaatattatttgtggaatttttttagtcaactgctttgtaactactaaaaccaatgaataaaatggacacatgatgcttatatgcatttatattctataaagctataatgcagaatattttagtgtgttcgctactgtacttataggaattttataagcaattatacttttaggtatcttaaacacatatataattaaactcttacacatgtgccatatcagtcatgtgggttttttcctttatttcaactgccttcatattgatatagcactttgaaatagttaagaaagcaagaccattattagttataatttgtgtgtgtgtaagtgataaaattcttgattaattaatttttttttctagctgaaaatgcaattgaaaacatggtgggtccagactggaaaaagaggtggttatactggaagaatcggacccaagaacaggtagaaataaacaagtctctagtcttatgatgatataattttgttcattttaattcaggcattaaaatataacctttttgtggctctagaccagtctcaggaatattaaatgttttatatcatactttctaaaatataatgaatctttagaataaagaataaactacataagaaagttttttttaagtgaagtagccatgttgttaaaagacaagagatgaaacatgccccttttgtggttgattacattgttcatttcaattccctgtttgaggtaaaaaggaagattaaagttatgaacaggccaggcacggtgtctcattcctgtaatcacaaccctttgggaggccaagtcagaggaatcgcttgagttaaggagttcgagaccagcctgggcaacatagcaagacctcctctttactaaaagtcaaaaaaaattagccaggtgtggtggcgcatacctgttatcccagctactagtgaggctgaggtgggaaggattgcttgagcctgggagatcgaagctgcagggaaaataacttgtgaatagaaaaaaatagtaaggttttcagaggatgtacaatgaatatgattggcgggaaaagatacaatttttcttgccttattttattatcttatctatatctaccattaaagtccctacccctcacctccacccctgttcattcctttccgattcttatagcttcttttcctatctagcattcagtcttataccactgtctcattccttgttcattccttaaatgaaagaatctaaatagaatatagaatctaactacataaattaatgaaataatgaagatgaaaaagatttagcatccaatccattttcttttcttgtttgctttgttccttgaattcatttagagaaaggagatcaagtaatggaaaaatagaggagacaaagggaataaaaattgaccaaatgagatgtccctatttctttattttatattttcattttcattttaaatacagttaattgtataatctatatcctatttttttcctagtttcccacatttcttgtttcataagttctctatcagatgtgagtctcaactttcctcaaaataatgaagagacagtcttctttttctctgtgtttctttactatttttttttttggtaatgacttttgtgaaaaatgagccattaagagactgaagcaaagctgaggaagcagacagttagtgattgggtcatgcatgtgttcagggtgcgttggttatctctgctctacagatgggccgagagaaggaggtctgtcagaagagaatttctagagatccatccaaggtttctgactttgatagaggaagatgcattgattagaaagagctgctgtaagggagataaactgcaaaagaaaaatggtatctggccttcaagacttagtgatattaggcctaaagtctctagaacagttggtggcagaacttgcctcagcaactgactggtggtaaatgtgctttggccaaacactctctgaaagaagtgattcctgctcgtaagttatttttgtcaggaacttaaacccataggggaatcccttcaagagaaagaaaggaatttgctttaaagtcagtgcaaagggtctgtaagcctagaagaggaatctggaaaccctttacagaagagccttctccccacaggatttcagggcagcatgtgtgagacccaggctgactgtagaacagaggccataatttggaatatagaagggaggggcatctgaatcacccggggaggtgtttatatatagtgttttgttttttcttcaaaagctagcctcatgtcagactcattgagtcaagctctccttctctatcctttctatccctcccactcccagttgaagacaagtgttttcaacctcatacctggaggttacagtgagacatggattctagaagaggttgagaatatccctaggtctcacatcgtaagttcacttagctgaatgacaggatttggcaggaaaagaaacttaaagatgagaaatccattctctgaaaagtattttgtgcttttgtgtttcttttgttttctaggaaaattcatccctttgaaacattctcgccttgtttaagccaaactaatggaaattttggtcaggatagatccaagagtagttctctcttctaatggccaagtgtggtgacagtcaaatgatgggtagaaagggggaagtaaaacatgaggcaggatgagcttgggaacaccattaccagcgatttcctttccatctcagactgaatagtacatgtttaagcaaacagtgaactttctctttatcaaatgctcttttttctgaagtattagttttcagagagtattaattagtagttccatttacaagttaattgtttgcatttatgtgttaatcttgtctactcagatttcatagctgtgatagagtttggggcaaaaaaaaacactcagtttcgtagctgtggtagattttctattctagtaatttatttagggtaatgattgaatttaaagctagtttcttctatcatatacaattttgagtggaggtttgaaaaatgacaagattaatttaacacagtataagaatcttgttatcaaacataactagtgtaggtaagttttcctcctttggtaaagagattatgaataattacagataagagactggaagtgaatttaagaaggacagatacctcacaggagcagtctgaagtaccattttttatgaaaaagctttttaaaaatcaagctatgcattttatatttattggaaaagaaacatgtcaacaagtttaagtccttacagtaatctcgttcttaagtatagttcttagatatgaagcattttagaacatcagctcttcctatgcattcagggtgctttttcctagattcaaattataccctacggtcaagaaagaaagaaaatacatggtaagattcctggtgctgtaacttccacaggaaaaaacatttcagcaaaagtaaatacataacaagtagggctaatccctgggttttctaccctctcataaggcaaattcttctgtgttcataggccatttaccatattcataagccggggtgctgtgttctttcttgtgtttctttcttgtttgttgtgattaagcttgtgttatcttttatgcaatagtaatgtatttattaaaattgagactgtttttcaagcaccaaattatgaaccatctaaacacagtccttttttaaacattttaaagtgtgttcacaatgaaaccaagaatgaattggagaagatgttgaaatgtaatgaggagcacccagcttatcttgcaagtgatgaaataaccacagtccggaagaaccttgaatcccgaggagtagaagtagatccaagcttggtaataaatactgctgagaagcaggaatctgcttccttaatatttgtttcttgcagtaaatgttactacatgtgttagttagatatttaagtgcttaatttgacttttgtcacgtgtacatttgctgacagtaaaagcttagtcattttgattgcgtgaagagaaggaattttattctcagtattgcttttttaagagtaatgctttaatttgtaaatggagaaatttactttggcaagttcaatggtcaacagtcagttcatgcaaaatgggatgaaaccgacctagacctttgccccacgtcacgctgtttcagattgcaaaatagaatttctgtttaaaaatggcatatatatgtgtttttgtgtgtggtttacagtcaaatgtaactcaattagatgtgagtggattcagaaaaaataaaaatgttgtttttattaaattggatatgaccattgagttctttctccattgtcctcttttgttaatgtgagaataaaaatagtctacactttaggctactttttgcttaccttcatgatgctttttttgaggatgaattttaaaaaatactttcgggcccacgttttttaaaaactacattctctactgcttagttaagatgtaaggaattcaaaagctccttataatattagcttaagtgaacacaattagaaaaataagtctagtggggaaagcaatcattaacaaatttcaaagccacacaaactcttttaaagattatgtgctatttatgtttctgtacttgagggatgagtatacttattttaaattccaccacaggtcagaacaagtaaaaaaataaaaataaaattggtaaaactcaaagcagttatatacatctagcattatttatatattgaaaatgagatgaaagctaatgattacatgagctgtttgagttgaatgtggatttaggttttattcttgttggtcccagctctcgttaacaataagttatattcagtttgacacttttaaacgttatgtggcacgttggtgaatacagtaggagggattttctcttcagagtggtatagaagagatgttacgtgattttttttttaaactttttgctcatgtcttaggcaatgaattgactgtatgtcttaattagtttctaagaccaagaaaacctcaggttttttaagtgacagtttgttcagtgcactttgcaaagctataaaataagtagcaaagtaccacgagaagaatattgcatggactagatatcaggacatgtgaattctagtgtatttccattatattagctaataatatgtcctttaataattgataccacttttctgacctcacttacctcatctgtcaaaaggggttgatgtttttctagttaacattattattgttttgctcaaaaaaggacagagggtattaaagaatattggacactcagagtatctagtaataaagtggtagggatcatattggtatggtagcagtaaaattttataaacagaaaggaaatgttgagttgctagacatgatctgagaccatcttaagttctaactctgtttttagataaggctttcaacctctttctgcattggtttcctcacctctaactaggggaaggtaatacctaccctgtctactccacaagatgattatttgattatagtaacagcatttgtttaaatcattgctaatttttaagtacataaactggtaatgggtcagagtagtagtaaatctaatctttgccttaaaaaaagtaagtgaataaaaaaatttgaataactatgtaaagaataaccttgcttttgcttttaattaacttttttggtaaatataatttttgtacaacttctcagtgtggttgatcaacatgaagaatatacagtaactctgggctttcttttttctcattttagattaaggatacttggcatcaagtttatagaagacattttttaaaaacagctctaaaccattgtaacctttgtcgaagaggtttttattactaccaaaggcattttgtagattctgaggtaaggtttccaaaaacaaagagaagtatttttaagcaacagttgtcaaaatatgcttaaaagtaaactttagcttaagcattaattttaagtcctttgatcatctggggaaaaaaagtatgtgtaatttataaagaataatctaactcttatattttcaaagatatttgccactttgttcgtgatacgtgcatattatccccaatgcttataagaatatgtgaatataaatagtaaaaaaaagtgtgaatataaatagtaaaaaaaataaataaataacaggaaatagtcccttattccctgacctgtaagaattttagttaacatttttatgtatttcttttcaactttttctgtacatagggagagagacagagagggaaagagaaagtgtgtgtgtatctgtgtgtgtaacataaccatccatttgcataatggaaatcatcctgcaaaacagtttttatcatgcttttttcaggtgtcataattatttcttcatatcactaaatcttgttttaaataatcataaagttcttgtattaaaatgattcataatttaaagtaacccctaggtggcagcagtctgatatattttcagcattttcttacaagcaaaaatgcttttaaatatccttttgataaagctcagttaatcaacaatcttatttaattgagacttctaacatgctgttcttttgttttcagtagatgaacataaatttatatttaaatgcacctaattaaaagtggcaagttttttttgcataattttaattgtagagtgaacttctttctatagaaacttctgtagaaagaagaaacttctgtagaaactgccttctgtagaataagcttctttttaaatacatcactttattttcacacagctgaattttaaaaatggcttgagtacagactcaaagaaaagaggttaacctaaggacgtatttaagataaacatggttagctgaaactaaatataaatggagggtatatgctgtgaatttcaacttacatacaatgtaatgtaatttgctactactcaagcttatttactttgtcattagaattgaaacaaagctatctaggtgtcagacagatataagccaaattatgcagaatttcatggctccgtacagaaaggattctgtagcttatatctacagtatatgcattaggtaaatctgagtactttttaagcttaggacatatctactggttctagtagttgtatgtgtttacgatgatagttttcattttaactttgcatctggtaatcttagttacttaatatttcagttggaatgcaatgatgtggtcttgttttggcgtatacagcgcatgcttgctatcaccgcaaatactttaaggcaacaacttacaaatactgaaggtaagccacatagggactgcagtcttattttgacattaaaaaataatagtggtaatatccatatttaatagaaggatgccaaaatacttcccaaaagtagatttattagaaaaactggccaggtgtggtagctcatgcctgtaatctcagcatgttgagaggccgaggcaggaaaaccgcttgaggcctgtagtttgagaccagcctgggcaacattgtgagactctatctctacaaacaataaaataaattagccgggcatggtggcacacatctgtagttctagctacttgggaggctgagatgggaggatcacttgagccctaggattttgaggctacaatgagctatgatcatactactgcactctagcctaggtgacagagtaagaccttgtctctttaaaaaaaaaagacaaaaattattatttgcttttaaaataaatcataattggaaaagatgggtgataaaacataccaggagtttattttcattgcatgaaactctgttgggaatggactcctaggtatcacttagttttttgggaaatctgcacttccattaaagtgtatagcttaagaatatgacattctctgagactatataggtttcatgctgataaaactactgtataacagagattttctatgactatgaaaagtattagcaatagttctaacatgataaaaaatttactctccatatatataggttaattttatcatctttattcatttataaaaacgatgctcctcaggttttttaactttctttaaacagttaggcgattagagaaaaatgttaaagaggtattggaagattttgctgaagatggtgagaagaagattaaattgcttactggtaaacgcgttcaactggcggaagacctcagtgagtagttcttactgccctctaccttactacctttccacctttcccatttccatttgtttgttgatccatttaatctcaaacttacagaaaagttacaaggaactgggctgagcacggtggctcacgcttgtaatcccagcactttgggaggccaagatgggtggaaaacaaggtcagaagatcaagaccatcctggctaacacagtgaaaccccgtctctactaaaaatacaaaaaacttagccaggtgtggtggtgggtgcctatagtcccagctacttgggaggctgaggcaggagaatggtgtgaacccgggaggcggagcttgcggtgagccaagatcctgccactgcactccagcctgagcgacagggcgagattctgtctcaaaaaaaaaaaaaaaaaaaaagttacaaggaatttttttcttctctgaagtatttgagagtaagttgctgaccttaagtcctatcacttccaagtaggttcatgtatagttcttagaaacagattttctcatagcaaccgaacattgataaattacaatatctaattctcagacccctttcaagtttcacccgttgtcccagtattatccctccatataacaagatgttccaggctcaatacctgacccagcttcctttttttgaagaatggtgtttagaaatggagacctagaaattatatatgctgttattggaatatcactgttccctggtttctcagtggaaagagctaggaactaagtgttgtgaatgtttgtgtgtgtgcaggtgaatatacacacactgacatctgtattcctaaatcatgtgtatatttatttattaaaaactgtgagttgatgctgatacttcccattttaatccagcattacaaggtttgttctagtgttctccctttcgatatttgtcacttgctttcctgatagaaaacgggcttctagtatccttaatatattttcatattttggtcagtcctcctatacgtaacccaacttgaatgaagatatgtccttttccattgcagaaatgttctttttccccagctcggactcaacactacacaccaggccaccacatggcgccgcacccagcattgacacttcttttaccttgtctgggctctgacatccgtgccaggttgctcttcgtcatggagtcccttttactgagctctgctctgacgctttgtgccaggtgcctctccatctcatccttcccacccgctagcctctgcccgaccccagacagattccttcctcacctgaagccagaccatgcctttgtggagataccctctttaccctgcctgtgcttcgccagcctgcaccaggccaccctcctgcacagatactctcctcagtactggaccaggctaccaacagccccatgtgaacccattgtaacccaggtcaggcattaacacctgcagtaggctaccatggcttccccttcccacccccctagcttggccctactaataatcactttgtcactgtttggggttgatatttggttgtttcttgtaggttcctagctttaagataggattgcatactaaaatttacttagatctttgagaactcaaggaaatcagtgaaacattattgttattaaataaaaataaaatacctgtagttggtacctctgtttgagcctgccttgttacaagtttcactgacttcagcttcgtgtaacaaagtatctttttctttcaacgtgtacttaaatttcctgtcttattagttttctgatatctaaaaggaaaaaaagcagatatcgttaataaattagaaagaagttctgcaaatttaaaagtgccttctaagctgagttgtaggattacagtacaatccatagggttatcctgaagaagccaggcagggctcttctgtgttacaccctgtgcctgcgcagcatgctcaccccttgccatcagcgcttgcggccccattctctccctctagtaataatctaagttctgcattgctttctcctttccttttctttcttcctttaaatattcttctttcgagacatatctcattttaacttttattttcattttctgtcacttttggtttttctcatgccaccttggcaatgtagttaagtttgtgctaacgtagaagattagtgctcaaatctgaattgccatttactactagctgtgtcatcttcggcagggaatctcccagagccttagcttctttatttgtaaaatgactattatagtggttatttctcaggattgttagaattacttccgcaaacatttgcaagtccctggttcataatttcatgctaaattagtaccgttacaggaagtggtatatcattgtcacagtgtatacaaatatatttcttttatatccctcgtgatataattatcaagacagtgaaacaattcaatgaattttaccagcataacacatttttaagtgattggaaaatcataagtatcttttcttatgtttttagtagaggctttgcaaccccattactctccgctcccaatttgattatttaaaggaagtggattactaactcagatatgtacactgtcaagccaagttctatgttctactgctggttttcctgagaaagcagtcatataactcccttgaaatgatttactacttttgtacatataaaattataatggtgttaatgtaccaaataatgtccttggaagcaagggttttgccagtaactcagctgcatcagtcaccctcaaggagatgagccatgactttgttcattagttggaaaagagtctggagagtgccttttcgttactgtttatctttggtctgacacttgggaatagggtcatggatacttcagccagaaaactttccaaatttaagttattaatgtattataaggatcaaagtttctagtatagcctgttcaattagaacatagtgtgttggttgattggatttggagaaagggaggcaatcaaatttttactacagtttcagcctgttacagaatattgtatagagtgttaaaatgttgatgcattcatatttttgccagttttaagcttgtacgattttaaatcatttccttaccttggagacttcccccccacctttttttttttttttgagatggagtctcgctgtgtcgcccaggctagagtgcagtggcacgatctcggctcactgcaaggtggttctcccacctctgcctcccgagtagctggggctacaggcgcccgccaccatgcctggcttattttttgtatttttagtagagacggggtttccccatgttagccaggatggtctcgatctcctgacctcatgatccgcccgcctcggcctcccaaagtgctggaattataggcatgagccaccatgcccagccctgactgccctttaagatgagtacataagtagtagtagtacatttttctttcacatcctggagaagatatactgtgttcactattgaaatgaaaccataaagctagagttaggaagattgaagaaatgaaaaaggagctcacatgattttgtctcaggagaggctcttccaggattctttggagatatggtagattccatagctggagcagggaaaggacaggatgagcctgtgggtgtagaaaggaagggagtgcttgaaagatgatgaggagatgtcagcaggtcacagaaaccctctgaaggaggctccaactggccaggctggggacaatttgggccccaaaataatgacagtaacaaattgtaactcattgaatgaaataggaatccatacattggtaattatataaataagggaataaaaccatgatgcaaaaagggatgtttatgtcatcacgcaaaatatgttcacagaaaatatgtactaattaaaagagggaaaagagtaactttacagtggatgaagcctggcaatcatcactttaagcaagtggtcagagttaatattatcagtaatggtcaaatcaaaaccatatgcaagaagactctaaaatgcaagaagactcctgaagtacttcttaccaaagatgtagaacttaaattcagtcataacaatacatgagacaaacccaagttagagcacagtctgcaaaataactggcctgtaatcttcaaatgcatcaagatcatgaaagacaaggaaagagtgaagagctgctccagttggaagagacttaaaactaaatgcaatgtatgatcctagattggatctttttgctctaaggacattaatgggccagttagtgatatttgaaggggatccgagggttccattgtagtaatatatcagtgttaatttttaaatttttattaggttgggattattttggaaaataccattattcatagcgaatacaaagtagaatatttggggatgataatgcatgattacaacaaatgtttcaggagaaatatgatctttgtagtggtcttgcaacttttctgtaagtctgaaattgtttatgcataaaaggttaaaaaaaggttaaattttgtttttataactaataatggattagggtcatgtgaaagtactttagaggaaatgagacttttgagaacatcatccctgaagacgttgaaacactgagttacctcatggataatttaataggatatgcagctgatttttctaccttaatttcttgtttgcagtatctacccatacttagaattgtctggtgttaaaatatgcccactgggactttcatgaaattcttttgattttctagaaaattcagtttcaaaggattttttaaatagatattttaagtttggtgtcaacttagataaaatctgtttggagtcccagtgtaagttttagtaatgtgtccaatctgtttattgaaatagtataactttagaatactttctttggagagatgaagattggtatgttatagttcaattcaaagttgttctttctattatgatctattttataattcataaaatctatcttatgattgtcatcataagtgcaatttgttttttgccccattctacctcagaaactaagtatctgggcatcaataacaattggtagtagtgtttgctgctaagccaagtttcaccagtacagtgtggaattattttattgttttttctgtgaacattgtatctgctgttactaggttattgtgaggtattgggccttcatagaaattgcctggaacccttgttcactaaagcctgttacactttttattctctgtgcgtgtaatcagagacttattgatactgacacattcaaggggcattattgatcatttagattgctctaagacctaaggagtcttggccggatgcggtgcctcacgcctgtaatcccagcactatgggaggccgaggcgggtggatcacctgaggtcaggagttcgagatcagcctggccaacatggtgaaaccccgtctctactaaaaatgcgaaaattagctgggcatggtggcaggcgcctgtaattccagctactcgggaggctgagacaggagaatcgcctgaacccgggaggcagaggttgcagtgagccaagactgtgccattgcattccagcctgggtaacagagcgagactccatctcaaaaaaaaaaaaaaaacgaaaaacaaaaacctaaggagtcttttctccttattttacaataaattccttttgattttgtgtaaaaacttgaaactgtttatgaatgtaaaataacatttgaatacttttcttgtgccagatattaggttaaatgctttatgtgaattttcatttgattctcacaacttttgagttaggtagttatttttctcattttacagatgaaatggagggttaggaactcgtaggtagtagatgctgaagctgagatttgggcctgggtcttttcactactgtgccagaatcatttgggagggagtaaaaactcaagcctttggaaaatatgatgacataaaattgtcctttatattgagaagcttccatagttaccagtgtccttcacagggttgatcggaaagacatacatgttagtgatgatgataatgatgaagataatcattattaccacaggtacttcctataatataagcatctttcaaattgtatgagaactttcatagaacatctgagtaaatgaacagtacagtgtgcatgaaaccactaagcaaaccaagggaagttaattttctttatatgaattgtaaacatgtctctagatatcctttatcagattccaccatgcgtaagtagtgtctaagttgccccatatttagagtttttcaatgaggttgtgttcctacttagaatcctaaagttcagctataacagatatattaataaaatctgtggaatctttaattgagcataatggtggctgttattttaacttgaggctttttgttgagctggattggaagtgcaacttattagaaattacagtgtatttattcctatttcttgttctttatgtgagagaagatatactttagtagactgaatacttcagagctgtatctcatttaccaataaaatgtgaaaacagtggtaaattccttcacttgggctaccattgtacaggcctattttaatggtatagtttgatatccttaatgttaaaagcaatatagcttaaagaggctggtaaattagaattttccaatatcctcagctttttttcctctcacagttaatttgctctgctgactccctacgcgaggtggcaacagctggcccttttactggagcttgtggggattagagagtcgggctcgcagcagcgtgctcggcctcttgcctctgttgactgttctttattgtttgatgcctgagcatctcccagacagcgagcaattgtttctggaaacttaaagtttgtttctcttgggagtagacaatgcttttggggcttgtctttgtgtttcttcactttcccagtctcctcttatccttcatcctgtgctttctcttgataattagaaaggagcaaagataccacctttttatttaggtctgcatgagattctaaaacttagaagtataggctatagatgaaagtttcttttttcagtaagccacctcagtaacaaatcatgttttaaatgaaaactttgttcttcataatatcatttagtgagagaaaacaaatgcatgagtgcatttttgaaattatggtactaaaagggagcagcagcaaggtgacctaatactgccattttaaaagctaggattagaaatgtatcataactgcttaaatctaaaaagattctttcactgaatccaaaatatagttctaatttataggatagttataagaaatctctatgccatgtggaaacatgaataaaaagtagtcagaacatagctaaatagaaccctgaggtaggcagaatgattttattcttcacatttagaaaagaaaacatcaaggtaccctggaacttaatttctacagtgacttcacattccgacacttctcccatacctgccatacccttgagtgttgttacggatgagaatatcgtctgtgaagtagtatgagatggaaattttcctagaaagattattgtactcggaatttggaactgaaaagtgtagaaaggggaagtgatgtgtttaaaactgtttgcggaggtggggctctgccatgtgtattttgacaaagctacacaggtgattcttgccatccccgattaccgtgtacccgcctgcccctgagctggcactccaaagagttctttcagtgcatagcaagacaatttttcatgctattaattgggataaaattgacatacattcatttgtagagtctgagacacaacgtcactttggaaaatttggtgagcaatttgaactgcatctgcactggtgtgttctttttgtttctgtagacttaaccaaagaaaatgaactttaaagggactttaaaggcatctgcactggtgtgttctttttgtttctgtagacttaaccaaagaaaatgaattttaaaggaagagagggtgataccaagttgtagaattctaggtatgtaggttcagaggagattttttttttttaagaaaaaaaaaaaaaaaaaaaaaaacacccaatcaagaagaatagagcagggtgtcccgaagagaacgtgtgagctcgaagcatcccggcagcatctttcatatctcagtactgttgctctgtttcttgggctcacaacaccatttcctctctcctggcttttaacacatctcgaggcaaccttttccctttctttttatgcacttctctcactgcgtctcttctatatcatcatcacttcaacctaacccagtatttttatcccacctgcttatttaccttccttcagtgactaaaaaccttactcagatactgccagtgttgtttaattgagcagaatagaggcttctcactataggcaactgtaaatcaatgaaaataaccatttaaagaagaaaaacattttcatgtctatcacggtcgatcccttctgccaaagtgatttggttcattcataaattccccatacctcgtgtgttacatattgtactgtacacatttactgaatgttcgattgtgatcttgtaatacagactgttcattagcccccttctcttgacttaaaaagttggggggaactaactcttttcatcccaaggaaactttcttctactctgtcttgccagaaagttactgctcatttctcttgtagagcagcttgcctgtgtggcattcactcctgttctgcccactcccttcctaatatcgtgcagtctggctttcatctatatcaaaaccacttattgatagatcaccaatgatttcctaatgccagtctacccagttcaccaggaaactttaataactttttatgtttattaggaatttttaagttcattggaatacattcaagtactttttggaatgattatatgatgtagaaatgtgtatgtttgagagacagaaaaattgatttttttttcctcttcactacagaataaataatgtatttgttttatggtagcaatacttgaactctttaaggcatcttttcatggtaaatctggcaattttaaaaatctgggctttgtaaaataattttttttatagtaaggcagttaacacattaaagcaactaggaaagatagtgaagaattatttttaccttgagtctgtatagatgaagtaggctctgctttgtgttggaacagaacaaacaaacaaaaaaacctgagttgatacaaagataaagtaatcctcaaggaaagtcctctctgttagagaagtggttatttacacacagaattccacatgacaacgcctgagtggtgtggtttccaggttattgatgagaaaatcgagactcaaaatgggtcttttagaatgaagtacatttttcatggcctaagtctgtctttaaaagtcaccgttgtggccgggtgtggtggctcacgcctgtaatcccagcactttaggaggccaaggtgggcggatcacaaggtcaggagatccagaccatcctggctaacacagtgaaaccccgtctctactaaaaatacaaaaaatttagccaggcgtggtggcgggcgcctgtagtcccagctgctggggaggctgaggcaggagaatggcgtgaacctgggaggcggagcttgcggtgagccgagatcgcgccactgcactccagcctgggtgacagagcaagactcgtctcaaaaaaaaaaaaaaaaaaaaaaaaagtcactgttgaagaatatcaataaattagtacaagcgtaaaagaacattttcttttctataatattatacatgctgctggtaatcaacactttactagcaagtatattcttttgctttaaactcaagttttaactgattaagaataaagacaagaatgttctctacaataatgtatggattgaatttgccatttatcattttaatgtaggttttacttatatactattgtgaaaatactcttaatgtattcaaaaggccagtgcacaatttttttttcttttacttcttttttttttttttttttctttagaaagagtgtcacttgctgcccaggctagagtgcagtggtgtgatcatggctcactgcagccttgaactcctgggctcaagtgatctaatacctttaaagttgggaataaactttatcttaagcgtttttatttttaaattatgtttttgcatatttgatagaaaaagtagaatgtagtaattgaaaacctaatcacaaaacaattcattggactctgcaacagtatataaaaaataaaattaaacgagataggaaatcttaagggattggtggattgatgcacatgaaactggtaacctctgttaagtacagttctccaggtagttggagaaattagttaaatgtgaagagaattttaattttgcactattttgtacatttctaaactgtgtctcccacagcccttctcccccagtgagcacgattcagaattactttgaaatgttgtagtcttaattatcctattcatggaaatgacgaagctaatacacgatgtgctctatcttaaaagtaacagatattttcccaagtaacctactgctggttgtgatgctgagggacatttcatgggactgcatggtcgttgctcatcgtgataccatcctcagtggttgggggattcacagtgaattctcatatcctgtaactatgcatcatggatctatcatctgaaaataaatcaaaatctttgttgaactcacagtttccacacttgtatcacccatttaagattgtttcattgttacctcctgtgtacagaatatttcatttcaatttctcttagaacagctcattcatctattctctagtttcaatattctgagcagtagaagtttgctgttttgattaacttcagttagatctcttttctgggccaagaattaaagccattttatctttagtctctccttttgttggcactgcttcatagactgtgtcatatatacagatctgtctttagactgatctttaccaaagtacactactggaatttgagggtttttttttttaacatccttttcattatgagagagctagtgtatatgcattgtgggaaattagaaactatagatggcaaaattttaaaaaataattgccaccacccagagattgcactgtagtttaagacacttttgaatgtggtcctagggacataatttctggaacacatttttcgtgaagaggtctcaggttggcttcttatacccacagctcgttgtcattgcccctagttttaatttcccatcgctcagtgggctagattttttttcattttcttcatataaacttatttcagaaatgttcattaagaggaataagcagcattagtaaaaatgaaacctatggtacccattactttatatagttcaagtattctggaagccatattgtagcatagcatgtactgaaaatcactctcctttgaacagtaatcccatacctgtatttgggacctggccttcctttgtgtgcttgtgtattcattatatcccctttctctcttcaaagatgctcaagtcattctcatcttaaaactaatgggttgaaccttccatgcagtctagtagctactgtgaactctaatctctattacaaaggttagctctttgagtctcacttctactgaagttgtttttttttcccaagattactgaaaatttaagagaaaataatggcccaggcatgcattcaggactagaaaatacttccatgtacagaaaaccaaacaccacatgttctcactcataagtgggaattgaacattgagaacacatggacacagggaggggaacagcatacgccagggcctgttggggcgtggggggcgaggggagggaacttagaggacttaagtgcagcagaccaccatggcacacgtatacctgtgtagcctgcacattctgcacatagagcccgcttttgtttttgtttttgtttttaagaagaaataacggggaaaaaaaaggtttcaaaactcataaagaaagagaaagagagggagggagggagggaagaaaatgcttccatgtaactgcatcatttggtactttggagtccatatcctacttgaaactctaggatctggccctcacatttatgtagtgctttattttacagtttacaaaacttctgcttgtccatgtgtgtctgtaaagtcatatgaggcattatgcccattgttcagatagagaaattaacgttcattgacataaatggttaagcccattatgtaaatatttatggcaaagctggggctaatcatatgtgttacagataggactttttttaaagaattgtttaggtattctgttcatcattagtctctgggtttgtgtttgtggtaaccatagacaaccaagttcatataatttggcttcttttttatgtgatttttgatacgtgttaaggatctataacaatgaatttgcctcctaaagaggtacataatgttttcattcctccaaaaagataattctaggtttataaatctatgtatgctcagtgccagttgaattttgtgattgttcaatagaaaagaaattgtgacttaaaggtgattttccagtttaatggaataaatgaaattagtttagaagttatttttatttttctgagcctgattctcactcagttgtgataaacagcacctctgtaagataaactcggtgataaaccgagaacttctgaaatcagcctaacatgaatacctgttcttcttgtgctaagtttcataatgctttatcctaatacaccatttttttaagaaatggaacttgtatttcatttttgctttcatctcacctaattcataattttattaaaacctacgatttttaatttctttttttatgaatttttagtttggtgtataaatcagaattacattctctgatcttttacttttaaaattacagtgatgaactgactgtttaagaatcattctcatgattcattcgtctgttatgcctcctttttaaagcttcagcactgaaggtcttttgacaaaccaatatttataacagtttgacagcaggatgaggaacagcgtttgtctttgtaacagcttgaagaaagaccctttccaggacccagtcatgcagttacaatcttgacctctttcttatgctgggaacatgcatacagcagcacctcccatgtgttttcttgtcccattgactgtccattcacttcccatctgttttgcagtcttaaaggaacagaaggggccttcttataaatctgtctttgcaggtgataaatgatgcctacctctttaagagctgcctgggtggttttccttttcttagaacatttctgctttcctcctaactaaatcagggaaaaatacaattttaggaataagagaaaaagaagaaaagatgaatttttaaagcatttaattgactaagaatattttactgatcttttttaatcttcccaattaattgcctaaatcatattttttaaaatgtattatcgatatttagatttttgtcagggagtaaaatgaatgtattcattttgaaataatgtaactcttttttgagaaaacaaagccatgtatcattaatgagttaacatataaaataactttttaagttttttgtgataatttaagtgtggagcatcttatgtattggatacaaaagtaaaatatttcagagtaaatcattgtaatcttatggtaaaatctattcattttttacatttaaaaagatgatcataaatcccataaacatttatgcttttacttctgttgctgaaaataagtattgtaggaatagatattgatatcattgggttttctaagaattcagcagaaataaaaataatttactttttctcccatgcagaaattatttatgcaaggttttatgtaacaaatattgtccctctatggccctgcagaatattcttaaattactgatttaaaaactattaccagtataaaatgaccacttttagaatattgtggtgtattatgtgaatcagctggctaataatatatcttctgtggactagcttgttagtttgtttattaattccctggcatattccaaaaggaatttgaggcagcttacatatatcctacgcaaaagataaaactacttaagtgaaaaatttgggttgaaagaaaaggaaaatccaggcaagtgaaataaagtaaactttcagataaaattggtgcccctcaaagtgcatgctcaagggttctacgtacaggcagacctcattgtattgcatgtcactttattgcacttcacagttattgcatttttaacaatagaagttttgtggcaaccctgcattgaacaagcctgttggcactattttcccaacagccatgtgctcacctcatgtcactgtcacattttggtaattcttgcaatatttcaaatttttccattattattctgtctgtcatggtgatctttgatgtttgtattgtagctattttgggtaccactaactgtgcccatattagtcagtgaccttaatcagtaaacgtgtgtattctggctgttccaccaactagacattccctgtctctctcctcctcttcaggcctccctattccataggacacaacaatattgaaatttggccagctaataaccctacaatggcctctacatgttcaagtgaaagaaagagtgccatatttcactttaaatcaacaactagaaatgattaagcttagtaaaggaggtttgttgaaagccaaaatgggctattagccaaattgtgaatgcaaaagaaaagttcttgaaggaaattaaaagtgttattccagtgaacacacgaatgataaagcagaacagccttattgcctgagacgcaggaagtttcactggtctggatagaagatcaaaccagccataacattcccttaagctaaaacctaatccagagcaagttcctaactctattcaattctccgaaagctgagaggtgaggaagctgcagaataaaatttgaagctagcaaagtttggttcataaggtttaagaggaaaaaagccattctgcaacatgaaagtgcaaggtgctgatgtagcagctgcagcaagttatcaagaatatctaactaagataattgatgaaggtgattatactaaacaacagattcttgatgcagatgaagtagctgtctattggaagacgatgccatctagtaatttaatagctagagagaagtcaatgcccagcttcgaggcttcgaaagagaggctatcccctcattttgggtgccaatgcagcaggtgcctttaagttgaagccaacctaaagaatttaccattctgaaaatcctagggcccttaaggattatgctaagtctatcctgcttgttttctaaaagtggaacaaaaagcctggatgacagcacatctgtttacagcatggtttactgaatattataactctcgagacctgctcagaaaagttttctttcaaaatattactgctcattgacaatgcatctggtcaagcaagagttctgagggagatgtacaaggagatttatgttgtttttgtgcctgctagcacaacatccattctgcagcccatggatcaaggaatactttcaaccttgaagtcttattattttaaaaatacgtgtcttaaggccctagctgccatagatagtgattcctctgatggatttaggagaaaaaaaaaggaaaagcttctggaaaggactcaccattttagatgctgttaagaccattcaggattcatgggaggaggtcagaatgtcaccattaacagtttggaagaagttgattccaaccctcatggatgactttgaagagtttgggacttaagaggaggaagtaactgcagatatggtagagacagcaatagaactagaattagttctgttgtaatatgataaaacttgaacagatgaaacattgctttttatggacaagcaaagaaagtggtttcttttttcttttttttttttttggcagtctcagtttgaagaaagtggtttcttgagatggaatctgttcctggtgaagatgctgtgaacattgttgaaatggcagtaaaggatttagaatattacataaacttagtagataaagcagctgcagggtttgagaagatagtgtcccaatttttaaagaagaaaaatttgagtaaatttgggtaaaatttacccaaaattacctattgtgggtaaaatgctatcagacagcatcacatcctactgtgaaatctttcatgaaaggaagaatcaatcagtgcagcaaactacaattgttgtcttattttaagaaattgccatagccaccgtaacctgcaacagccaccaccctgatcagtcagcagccatcaacgtcagggccagaccctccaccagcaaaaagattatgacttgctgaaggctcaggtgatccttagcatttgttagcaataaagtacttttaaataagttatgtacattgtctttttagacataatgctattacacacttaatatattacagtatactgtaaacgtaacttaaacgcaccggaaaaccaaaaaaccttatgtgactcactttattgtgatatacgctttattgtggcagtctagaaccaaacttgcatatctcccaagtatgctgggactttgctagaggtaagctgcaaatttagccctcagtttcctggtggctggcagttacaaaatggaaagcagaggtcattccatcattcatggtggccatcagacaacaacacagcagttgcttaggagaagcatgggtcttcttcgtacgcacaactgagagaaatttcccttaaagtggacactgagttagatgatacaatgaatctaatggctacacataatcatgaaaatcatggggccctttattgtaatgtttctcatgcgggctaacatgcgtagttctagggaaaatatgatgctgtccaaacatacagctatttggtttggcttatctaaagataaaatacatagtatccagagaaatagatgaactgtatgtcctccatacagtctcccataaatattatttctttttgcagctgatccttttagtaaatatcaggtagccagaagttcaagattttacactcattgacattgacaagcacctggaatggtactaccttttttttttttttttttttttgagacagagtcttgctctgtcacccaggctggagtgcagtggcatgatcttggctcactacaacctccgcctcctggattcaagtgattctcctgcctcagcctcccaggtagctgggattacaggcgcccgccactacgcccggctaatttttgtatttttagtagagatgggttttcgccatgttggccagggtgatcttgaactcctgacctcatgtgatccacccgcctcggcctcccaaagtgctgggattacaggcgtgagccactgcgcccagccaagtactatttttattagttaagtcagagccataatcattataactgagctgaaattagaattgccatccacttaagaaagttgagtggtctaacaagtataaaagcctaaatataaggctaattcatgttcatactgaagccttttggggaataggccttaaaatatgtagaaagtatttgaagcggttttaattgtactagccaaaaggagcctagtagaaatgcttgtgttataagagtttattttttaaaaagctgaatttatctgaccaggcgcggtggttcacgcctgtaatcccagcactttgggaggccaaggcaggtggatcacgaggtcaggagtttgagaccagcctagccaatatggtgaaaccccatcactactaaaaatacaaaaaaattggccaggcatggtgatgcctgcctgtagtcccagctactccggaggctgaggcagaagaatcatttgaaaccgggaggcggaggttgcagtgagccgagattgcgccactgcactccagcctggacgacagagcgagactccatctcaaaaaaaaaaaaagctgaatttatcaacaaattgctgtggagttttttatatattcagcaggcatcagttgtaatttacctcacagactttcttaaggttgctttctttctaaattatactttatgggggtcacaaaatagcaatttttaaataatcacctttaatgattaagtattgtttaagtcagatcactcaactatgaatgcatgaatattcatggacatctattacatagcaagcagtgctatgctgggccgagtgattttaaatgacagactttttggtaagtagagaatttacccaagcagtccttgctgttctccacattaatgctcagaaaaaatacattataaaaatgatctttccaaaatgaattatgaagccccatgagaatgatatggcaatttgtggttacatattttactagaggattaatatccaataaataaaaagatactaaggaataaacaaaaaaaatttaaaagatgaagtatataatgaattagaacaatacattttaatcataagttttaaattagtgtggactttgaattctcctggacagattccttcattttatagataaagctaggactgtgacttatccagttatgaggttaacggcgaatacaacattgtcatatattttaaatgacacacattacaacatgttctctgctttataaaaatcatatcaaataattgccccatagattattaaaggtgttagactagggattcttaaaaaaaattttcatcaaatgtttctttcattattaatcccatgaagtccatgttacagaagattttgtctacaacagtgcagttacattcttctcgttagaaatacaaccaccagttagagttcctaatcagtataaggaagtagttgttaggagaggggatgggtttcttgtccaaatgaagttttccatttgagtttttgaagtagtgaaactaacccagcgtttacaggccccagaaatctgggaacctcagctttcaaagtactgtaccagtctttaacagttttcctggacgtgtgaattgatgcctccttctgtaacatgcaggagtgttctgtctgtcttcattgagtgttaaaaaataatcatgcctatttcaaggaaaaaatctacagaactaagatgcagaagataagtgctagatttaatcatattccttcatctatctgtttggttcaacctttcatcaactaaaagatgcaccttttttcttgtgctaactctaagattttagctacagttttgagaatcttgagtgtagtctcttgtttaccttttttcctttttttgtttcccccacaccctagattcatttaaatactgaacttctaaagggcaagtatatagtgtagtttaataaaaagcaaaccttttcatgaacaatatatattacataataagaagcgttcctttacttttcagtactctagtgaatagctttctacagtagaatctcacttagagggtgtcttaaagcttaacaccaagtgctcaggcagcatgttatacaacagttccattaaggtacatttggatctttggatgtgtggtttgcttaaagtacactgcattagtaagttggcagcttgctttctttaaaaacatcaaaagttttaaaaggtttatttcagggcatgtgttagtgttttgtgtgtggttctttgttcctgttctaaactgttattaaccactgaagtgaaccttctcccgggtttggccttttggtattcacagtgtattcaaaacctaattacagattagtctatatttgagacttttagagcaagtatcagaagacccaaaaagaaaatgagagtagcagtatcatttcatgtagagataaagagacccaaaacatgaatgggtgtcaagtcagctgaagaaaagaaaaaagagaaggaacttcattcactgagacggtttatgagttggggattatgggaatattcatgactcaatcaagaagcacagtgaattgatgtttgaaatagctcatcttttaagtaaacattggataaatggaaagtagactcagtattcactacacgtagaaatagctatttctgtatagcagaaatagcagtttgttaatcccttcctgagttggtttaatttaccaagtaaatcacaaattttattctttatttgtgaatatttaattcaaatatttaatggaaatatgagtttgctttataattagtcatgctgatccatacacgtatttctgagagaaagcaatttctaatggtgaaatagttacaataatatttttgaaatttgaaagcaccgtgatactgaagcattaatctgaaggatcggaaagtagggagtttttgttgccaacatttaacttcattgtttatggataacttggttttctgggcagccagatggcacagttagtatacagacattcttggaaacttgtatcaaaatttaaaatgaatgaatttatgagaaataattctgcttattatttgtaatgtagctttcttgaaaagcaagaaatcggaatgtagtttctaaagctgcaagtgaatatgtatacatagccagctctttcagccttgataataaggtgcaaccattaagatgaagggatttttttttcccacttgtgtttttgggcccgagtatcctgatctgtgttgcttgtctggttcaggtgtgagccaccagctttctttgactttcattatctatgtgtatcttgcctcctgttcccaggcttgctctagctcttctgatcctgtcttcctccctcttgatcactagtgtagtattcatgaagccagctaagttagtttttccctttgaaaaccacagcccttatcttctgtgccatattttgggcaacttcgtttatcattgattgaccgtacgcagtgatcaggccttgttctagacactgaagactctgagcatttttgggcccattttgtactcctgtattgttctccaggggcttctccaagtgtgcgtcaatttagtcttctcaagagggcatcattttcatcagaatatgatagcatattatggagtgtccggtcatccttaggcatagactacttaggaggtgtaactgttttgttccctgatttttactgaaatgggtcttttctttttttttttttttttttttttttttttttttttttttttttttttgagacagagtctcgctatgtcaccaggctggagtgcagtggcatgatctcagctcactgcaacctccgcctcccgattctccctgaaatgcgtcttattttaagtcaaaggtaatacttaaaaaagaccaaagagacttaaaataacagcatttgcttcgtcactatgagctttgttattatgagttaacatacagtagcagactgggtgtagtagctcacgccctgtaattccagcagtttgtgaagccgagtggggaggattgcttgaggccaagacttcgagaccagcctgggcaacatagtgagacccccatcttgacaaaaaaaattgttttaaattagccaggtgtggtgctgcatgcctgtggtcccagctacttggaaggctaaggtaggagaatcgcttgagcctgggaggtcgaggctgtagtgagccgtgtttgcatcactgcactcctgggtgacagtgcaagactctgcgtcagacaaacaaacatcgtagcagatgtgtttcttaatcagagaagtgtagacaaggctaactccaggctttaatgtcctcatatttagcaatgatacctgcaaggttgtatgagaaccaaatgaaacgccaaatttggaaatacatagtagatacatcatagcagagtaagccaggaatgcttctcaaaggtaggatatcatctgtgtcctcatatcactttatgaagtacattgtgaaagtgaaagaacaaagaaataaatgttttttagttaatgtttaaaggatacatttatcataattgctcttttaacactcacctccagtctcccctccgttcacacctcctacccccattacttcctggtaacttagttaagtgtcctttgtcattcctgaggtttcaaggcatggtagtactgtgtcctgatattctaatcgtaaatatttaagggaaattcggcattttttcattttgtggttttcatattaaagtacattaaatagtctttttgcttttatttaggaaaaaaactgcttacctgttaattttagaaaaatctgattttcatttagaccttacagggtgagacacctgcatcagggtggctcttggtatctttcaattcaattggatcttctctgaatagtctcttgtagggagtgaggctgctgtaccacctccctgcagtagtccatccagcttaagatgggggtcaccagtaggccaaaagaatgggtagacctggccatgcactgccctattgtactcaaatcgtgtatcaaatggagttggatttcttctcttcatacagtacagcatttccaagtagaaatatttctcaatgaaatgtggagagaagcacccgtttgagattcccgtgtgttgtgtgatttaagttagatggttttttaagaccacattcatttccagcattctaggtaacaatttagaaaatgtctttctcctaacctccccactttttaaaaatcctccaactgatgaactgatgtgaaactttcttacattcactgaaaaaaaaaaaaaataggttaagctgtttctaagcaactagatgaattaatttttaaactaagaatgtggccttattttgggaaaacaagaatatttacttgtttgtctgctgtttaaaaaatggaagtcagcctaccaaaaaattgagactcaacttctaggagatgggttaggatttttttttttaagtttctctagtttaattttatatataaggggttaatgctaccttcataataactattatcatattttctcaatacatagcttgattaaaacaactggactccccccccaccccaccccacacacacacagattttatatcagtctgaatctaatgcctagaataagaagtgcttcagccaggcatagtggcactcacctgtagtctcagctactcaggaggctgaggcagcaggatcaattgagcccaggagtctgagtctagcctgggcaacatagtgagacctagaagttttaaattactggaaaaataatatgaaaagaataaattactggaaaaagaatatgaaaatgttacgttctttatatccaaccgtggtaggcttttttgagttcctgcaatgctaataagaattcataaaaaggacaattcttcattttcttgggtactcatcactaatagctgcctcgctggtaaaaaggaatacatgtatcttcaattgcagattatttacttttaaatataaaagatataaatgtcaaatattaaatgcatcttacatggttttcctacatagtgaaagtagaatgcttgccagttttgcctctaggtcactcactttgaaccagccaacccaccttaattgatcatttccactaatatgttaaattaccttaaaagaacaaaaatatttatcatgcttactataacctgtgttttaaaataggaggccaggcacagtggctcacacctgtaatcccaggactttgggaggccaaggcaggaggatcacttgagcccaggtgttcaggaccagcctgggcaacaaagtgagatcctatctccacaaaaaaattaaaaataaaaacttagccaggcgtggtggcacgtgcctgtggtcttagctacgtgggaggccaaggcgggaggatcacctgagctcaggaggttgaggctgcagtaagccctgccaacaccactgcacgccaacctgggcgacagagtaggacccccatctcagaatataaaataaagtaggaggtgcatgtgaagtagtatagatcatgacttttccaattttaagaggggattggcatgtactatgagcagttcacatttgtggaggaaatctacatttcagagagtatatatttcatttggaagtctataaacatgaaaacctaaaataaataatgtaaatctacctctagtggctctggtatttttaaacttatttatagctggcaaagtacttttttgtatgtatttttatagcaccattgcacttctcatgtttgttgcaagcatctcccacagcttcctttgtcttttaattttatgacatataaataaaagtatacatttcaatatggccatattgattgatcttttcctttgtaactcttactactttatatttaaaaagtcatttcccagtctaaggccacctctattttcttttagttttttaaaatggtttcattgttttatatttgcctatgatccagacattagtaactgtgggttcttaattgggcttcagagaatctgagaattccttaaaattctctacataattgtacatgtacttaatacatgcttttttccatgttaagagtccagagtttttgttagatcctcaaaggggtcagtcagtctctcctcccacttccaaaaaatgtctgagacctactactataatccatctggactttatttgggtaaaaggtggtatggtgagactcatatttttctttttcccgcaaatagttaagtataccaaccatttagtaaataattacctcctgatttgtgatacctttgaaaaataaatgtttttctttatttttatctccacagagaaagttagagaaattcaagaaaaacttgatgctttcattgaagctcttcatcaggagaaataaattaagtgagtaaaaattctctaactgtattggtgctgactaaatacaaaattacacttttcttaatagtttatcattctgcttcatttacatcctgcttgtcacttatgctgtaatttcaatggcatgaatctctgaaactagcttccgaatttcatttgtataacgttgctttgaataacttgattgccttctggctgaattaagaatatcctctagaactcattttgaatagaacaaaggtgaacacagagctaagatattgtataatatgcaggtgactcattttctaggtgtaaagaattgagctgtagttgacattactttattcttcttgcctatagtctatcaataatgatgtgtatgttaaatatttaacttagaaagttttctgtttgacttaattaaaattttaataattgttcttaatccttatctcttttgtttaaaaacatttagataagtgtttttcctacttaatttatatagccttagaatttagtactccttgaatttactttcttgtctgattctgctttctggcattagaggcatgttcctaataaaatacatatttaaggacttttccttagtagcataatcaattaattgttgctgaagaattttaatcagtaagtcacttgcttgagaggagacctcgctctgccacccaggctggagtgcagtagtgcaatcactgttcactgcagcctcaacctcctgggctcaagcagtcctcccacatcagcctctcaaggaactggggccacaggctcatgccaccatgcccagctaatttctttaattttttgtagagatggggtttcaccccgttgtccaggctggcatttgcttttataaaagaagttgaggaaagaaaaatactgtagttaagtcattatcacttcaaatattttgtcacttttgtctgtgacccttaccctacagacagcctgcagcaggctcagaactagaaggagtagaaatgtaaaaggttccctccctggctacgctcggttcaggtcagttcagaaaaggctcttaaaccaaactacctactttcctgtcaggaaaatgtatttgagaaagcagggtggaaagggaagtacaacttccatggtacatcattcggaacagtgtgccagcaaaggaggagagaaacaagacctagaaaacttgaaaataaagctttgtaactttatttcatttgtttctttagtaagttaagacaggccagtgcggtggctcactcctgtaatcccagcacttagggagaccaaggcgggcggatcacttgaggtcaggagttggagaccagcctgaccaacatggtgaaaccccgtctctaataaaaatacaaaaattgcccaggtgtgctggcacatgcctgtaatcccagctactcgggagcctgagtcaggagaatcacttgaacctggaaggtagtggttgcagtaagcagaaatcgtgccactgcactccagcctgggcgacagagcgagactcttgtctcaaaaaaaaagtgaagacagatatatggaaatatacaaaaatacataatcatctttaacacaagctaaacataatttttgtgttttataagtgtccgtgttcataaatgttttctatgtcttttgtgtatgaatattttattttaaaaccattaagtgttacaatatcaccctaatcatggtggttaccgtgaatacttactattagaaataaacatctgtagcgcctccttgatctcccctttagcaccagagcttacatcatagttctatttactgacctgtgtgtgctttgcggggaaaaattgatgaaagccccggaagccccgttaaaaagacaagctgtatttctgtttttttaacaaaatgaggaagctgaaagccagccagtgttttacataatggtgtctctcccctcagctgatcagtgtgacatccagagttgctgttgctgctacctgtctagtctctaagacccttttcaacccttgtgacttaagactctgtgaacttttacaaagtatcttgtgatctggacagatgatctgttttgtaccctgcagatgcatttaaaagaataaatctggcagaatggtaaccttgcttcattctgaccattttatcaaagttaccaaggaccctaaggaatactttctcaagtatagttttaacacataggattcctaattaattgttattctaatatttgctgaaggtgtttatatgctatacagtcatacacagattcttcttcaattaattttagtatatgcttttaacttatgtttgataaaaaaattatgccaatattgttaggtcggtgatagactatataagtttagtaaaactagcaaaggtaagcggttaggcttcaacattgttgtgatcatgcagtcatcaactttgtttagaaattttgcatttatctcccctgacctcagtttgttaaatgggtttatttttacagaatcgtactcataatcagctctgcatacatctgaagaacaaaaacatcaacgtcttttgtccagcctctttttcttctgctgttccacctttctaaacatacaataaagtcatgggataaaaataatcgatgtatgttacgggcgctttaaccatcagctgcctctcgaatggaagaacagtggtaatggattaacatcctattttgttgtactaaagtgacaaatcggaataatataattggtatggccattaggttcagtccttgaagataagaaacttgttctctgtttgttgtcttatttgtggtggcactcgtttaatggattaactgaggttgctcaatgttcagtttcttttccagaaatacaatgctaggtgttttgaaataaaacttatatagcaattgtttaaagttatcaattgtatataaaatcacagtagcctgctaaatcattgtatgtgtctgtagtattctattcccagaaactatttgaccatgataattcagtttatattcaccacatgaaagaaaaatgggtaacagaagaacccttaaaacaggttaatttggattgtaacgttcagtgaaagaaatttcaacccttcatagccagcgaagaaatttgccttggaagccaagtcagtaccagcttacctatttgattcagttgctgttttctcactctctatatccatttgaaattgatttattttagatgttgtatacttacgttaggctttctgttaatagtggtttttctcctgttgacagagccaccggattatgacacaggatgaggaagattaaggataatcaattgactaatttcatttagaatattatcaaacatttcaactaggtatcagaaaaaggctttctttcataagactattttaaatagaaattatttcaacaattaaagtaatgttgaccatccccctctcagctgaataaagaaaaatttagttcaatttattgcaatttaattacaatactaccttcacaacattttcatgtgttttaaataaatattttttaattggctaaaggacattcaagcaaagaaatgctttctttacttaaaatgtctatctcatttgctgccttttcactaagcctttactttgttaataaaagtgtccattgtgtgatgtttttgattttacagtttgctaaatcttattttcttggagttgctttttggtaacagccccattgctactccccattttattgttttacatcaatgcatgcttcgttgtgatccctcaagatgtaacacttggtatgctcggttgaggatatgaaaaaatacttccgaaaccaggaattcaatgtatgtttgttttatactgtttgataagaaaagtaggtccagccttaagcagcacagatgcgctggtagatgcatagtcaggaactttttttatttcttttaggtctagggacaggagtgaatagaaagggaggagagctctattatgttctatacacagattaggagatgaccttactgggtacacccctctaaccagtgcttacaggttaatgcatgttaatgaatatttttgcagttgtaaagcataacaattacaactacacatctatttctaaagaataaaacaggaccatatttatttacttctgtcaactatagaaagaaagaccttcagctgtatttccacagatttctcccaaggaaaaggctaatattagtcactactgttatcacatccctttgtataagttttaaaaagagatggagggagatcttcatttctttgaggagatcagtattgtaacgtatgtgaatagatgataacaattaatattactaaaagtcccacatgagagtcctgacgccctctccatgccccacagtaatgtggcttctttcatgggtttttttttcttctttttagctgatctcatcctaagcatgctttatttttccttgaaagctaggtatttatcaactgcagatgttattgaaagaaaataaaattcagtctcaagagtaaaccctgtgtcttgtgtctgtagttcaaaagtcagaaatgattctaatttaaacaaaaagatactaaatatacagaagttaaattcgaactagccacagaatcatttgtttttatgtcagaatttgcaaagagtggagtggacaaagctctgtatggaagactgaacaactgtaaatagatgatatccaaacttaatttggctaggacttcaattttaaaaatcagtgtacctaggcagtgcacagcacgaaataagtggcccttgcagcttccccgtttaacccactgtgctatagttgcgggtggaacagtcaacctttctagtagtttatgatattgccctctttgtattcccattttctacagttttttccgcagacttctttctgcaaattattcagcctccaaatgcaaatgaatgatataaaaataagtagggaacatggcagagagtggtgcttcccagcctcacaatgtgggaatttgacataggatgagagtcagagtataggtttaaaagataaaatctttagttaataattttgtatttatttattctagatgtatgtatctgaggaaagaaatctggtatttttgctttccaataaaggggatcaaagtaatggtttttctctcagttctctaagctggtctatgttatagctctagcagtatggaaatgtgctttaaaatatgcttaccttttgaatgatcatggctatatgttgttgagatatttgaaacttaccttgttttcacttgtgcactgtgaatgaactttgtattatttttttaaaaccttcacattacgtgtagatattattgcaacttatattttgcctgagcttgatcaaaggtcatttgtgtagatgagtaattaaaaaatatttaaatcacattataattctattattggagagcatcttttaaatttttttctgttttaacgagggaaagagaaacctgtatacctagggtcattatttgaccccatagtataaccagattcatggtctaacaagctctcagtgtggcttttctctgaatgcttgaatttcacatgccttgcatttcacagttgtactccatggtcaaccggtgctttttttcacatcgtggtacttgtcaaaacattttgttattttccttggtaaaatatataaaaaaggttttctaatttcactttgctgccaaggctgtcattttcattaatgctgccaacatgttcatatgaggcttactaagaagttataactaagctttagaactggaagagactttaatttcatctaccatctgattataaactcctgttactcactttgttattcctccagaactttgctcataaatgatacctactaattgtcgatcattggatatgtcaagttaggtagcgtataggtgtgccttcttaattccttcagaagatgcagaggcaagaacatgtttcaatcgtgttagcattggttttctttatcagtgctaacagactcagtgtgaggccccatactttattttaaactaggttttcatccttgtgtaattcaagttcagaatcttcgtgtatcaaaacgtttgaagaatttagttactgaagatttaatagagcaattaatttttttagcatgtctgattgaagaattaatatatttatcaaattgaaatagctaccatgtgcctatagataatacagatgtatttaattatgaagtacgtcttaaaataaccacatacccgatttgtgataactaaaacaatcatgtcctgcacatattagacccagttaataagtgtagaaaacttaagtgttcaaacaaatactacaaaaattgttaaaggttcaaaaccaggagacagtatcaggaaggcttaaatatgggtgatctctagctggaagaagacagcttctaaaactaagggtaggaaaaacctatatcataaggcatttgtttaaatttatatcctaaaatgacagaattgagcttgaaaattgagagtatgtatgtgattcctctccaagacttctcgtgagttacgtacatattctgcagaagccgcgttaaggtgcatttgtggccaagtcactgacaaggaggtaaatactacttataaatgctgttaaatgaaaatctttttttttttttttttttttttttgagttggagtcttgctctgtcgcccaggctggagtgcagtggcgcgatctcagctcactgcaagctccacctcccgggttcaggccattctcctgcctcagcctcccgagtagctgggactacaggcacctgccaccatgcctggctaattttttgtatttttagtagagatggggtttccccatgttagccaggatggtctcaatctcctgacctcgtgatccacccgcctcggcctcccaaagtgctgggatcacaggcgtgattgttactctttgtgataaaaaattcttgttcctgctgttagtacttttaattcattaacccaggtgtaaactgttcctttccaagtatttgggaaattcagagatctgtttttgaaaaaactaggccagaggcacccctgaagatctagtcacagtgcagtgatactgccagcagccccccacagagatatgtcttacggctgtattaagaatataagttacactctttaatgttcagaacagaatactcattctgctgcttactcttgtagttattaaatcacagagcaacaatacggaagttagaattttatccatttgtcagaaaatatgctcatggtttatgtgacctaatactttccaaaagctcttgagacctctgatatttgtgagagaatatgtagggaataggttaacctcctttttttgctttggtaaacttcatctgagattaggccaaatcatcagaaagcaatactgcctgggctgctacttacctacctctttgatattacgtccttggcttcacaggcaagaccttatgacacatctatttgaagaaaatacacagtctcttttgcagaagtctaacctaatgacatgtcttgattatcactgaaattcattaaggattactagatagtaccagcggtttcccctccagacacatgtatgtactgctctccttgtgacaatgagaactcaagactttaccattttctttgcttcagctgccaggaaatgctgaaattaattt

SEQ ID NO: 2 - DNA, 5409 bp, Homo sapiens
  source 1..5409: mol_type = genomic DNA
gtgatggatggtttaagggggctaccgatacattcacactaatcagccatttctgccaagatcatgtcacctcaatctgttcatggactccaaatacaagaaattaatttgacaaagtgaaaatataaaagatgcatcatataaatatgtaacttttctggagtgggtagtataggtaaagccaaaagaaacaaattcaagcagaggaattttggtttctgaaaattaggttgtctgtagggtccctgtatttatacttagaacaaaattaggaatttctgtttatgtggtccagttattgagtcaccctaagtttgtaggcatcttacctacctacttgctccccaagtttttatttctaaaatgaaaagcattgctgtagatgaccagtttacactaaagaataacatttatttatttgttttagctaaagtatatggacagggaacattcatattcttgtagaagaaaattattttgacttttgggcaaaagcatgtagttcttatacactttgacaaactcattgcgtacatttttcacattaatcaaagtcagcacaaataaattttcaccttggaccacggagggtttgaacactggaaatttgatataattctggttgctaaagaacaagttctaataaaagcttaagtgtataccaatatgtggctgttggtgcaatcagcaggtccgtaaaaatatgattttaatggttaggtaatcccacaacggagatcccaaagttcatgtttggaagagacttttgggtcaaagtgaaatcagtgtaatgaatttaaaattatactctgagatcttgaaatcagctaattatgttacatcttattagctcagaaaagttttgaagttatatacaaatgctagtcaggaaaaaagattcagtcatgtaattcttgtacattctactatttaaatcaaccaatattatagattatgatttagtgcagtaattctgctggctaaccttatctcatttggtggtggttagtacttcagagtactcaccatagtttcatttatgttttcagcatcacttcctggtttttctcaattccatggctgtggaatcaattcatatgtatatttagcttcggtgagcaaaaacatagctagaaaaagaaaagaagtgagtttcctacctggttaaattaaagtcgatgtgttaagccaaggaggacttcttttgaatggtactttaacaatccctgttctgtatactgtgaatatatcatttaaatagcctaataaattggatgcttaggctgagccacctatactttagttttgttatggaaagaagggagaggagcaagtatgttcttatatgttacttagaaataagaatgtagctgtagttacacattgttcttaagtttttttcgtaagacaacttgaaatgagtcccataggcctgctatttaacattctaagatatgacttaaggttaatgatgagcttttgaatctgacaattcaagagatatccataatgaatactgattcattttctacattgctgaaagctaatgttcattttaagcctactttagtagcctttatttgggcttagagatgttattcctctttctgatatttattgggttatctgtttaacccttttatatctccctttcccgatttgtaaattagagactggcaagactttttaccctgagtagagcaccaaacatggcttgtttctgcccacactgtagttaccttgaggggaagtaaatgggactttaaaagcaatttatgctcttttatagtgaaattatccctcttactatcccgaaagactgttaccttacaatatcctccactcctttccccctgtagttactatagagatgacttttcggttcttcactgccataatgatcaaaatcctaattcatgagatttttatcattccaggcatgtgaggtttacttgatgcataaaaccgcaagtactttttgttgttttttaattgttttttctctcttatcttcttgaaagtctaagtagatcatcatttttgatgtcttattagtagcaactaataaattttccctgtatcttctcagcaaaagaactcaagcagagacagaagattagaactaccattggtagttttgcttcctatggatatgttcacatacatagaaatttttacaatgacctttttatatatgtatttcagaatttcagaatggcctcaatgccttaataggaagaaatacttgaaatttttaaattagggcttggttttgtgaggagctagtaaaggtttttctctttcagctttagcttgtttctgcggaggattccgctctttctccatcagtttcatagccctggaattgtagaaaagctctggtttcaagaccattgatatccatttctgtcagggtgagttttaaatttatttcatgatgcaaacaatatattgaacaacaggacatgaacttgttcttgttgtaagtggctgaattttatcagtaaagcacatcaaaataaaatataccccaattgctagttaagacctagagtgacagattgaaaatagcttgtgttattctcttaagaaaatatataaaaattatcatctcatcaatctttaatgtttgttttataaatctaaatgtttttatattgtttcctaggaaatattaggtctaattttttactttaccaccagctgtcttttattttactctttttttgagacggagtttcgctcttgttgcttaggctagagtgcagtggcactatctcagctcactgcgacctctgcctcccgggttcaagcgattctcctgcctcagtctcccgagtagctgggattacaggcacatgccactacaccaggctaattttgtatttttagtagagacggggtttcttcatgttggtcaggctggtctcgaactcccgacctcaggtgatccgcctgcctcggcctcccagagtgctgggattacaggcatgagccaccgcacctggccagctgtcttttaatataacattatgattaattgtgatgttccattaaactaagcggagaggaaacatgctggtaaaccatgtgtgagttattcattgtaccagaaaggcaaatgatacattttatcctaaaattcaaatttataaacatcttaacacttgtgatcattaaatactactaatctagcatataaattatatttgtaggcggggcacggtggctcacgcctgtaatcccagcactttgggaggctgaggtgggcagatcacgaggtcaggagatcgagaccatcctggctaacatggtgaaaccccatctctactaaaaatacaaaaaaaattagctgggtgtgctggcgggcacctgtagtcccagctacttgggaggctgaggcaggagaatggcgtgaccccaggaggcagagcttccagcctgggcgactccgtctcaaaaaaaaagaaaaaagaaattatatttgtaatattctactaaccttatatcattttaactttttatataacttttttattttaccaaattaagttaaccttttatagcccttggcttatactaaacatcctaacttttttgtttaattgtattagtttttaagttattgccccagatgtcaagtaatgttggattttctataataatttaggatatattgcatgaagtcagttagtatttacatttaaaactaaaacaatttatactaatacagtttatacatttcatactaatttagctacagttggataaatatttaatggaacaaagtaaatcaaagtaccttttcaaatgaattggaaattaaatccacataacaattttttatgaccacactattacagtgtgatggcatgccaaatgatcataatgtggaattatgtatttcttcattggctttcaagattctgttctttagtttgtgggctcctctccaacttgcttgtctcctcacagtttaggcgactgtttataattcttgtccatcctgcataaacacacacagtcaaaatgaaaaaaagcttctatcagcagatctgtgcttgctgtacagaaatgggaaaacaattgaagtttgcattatcttttttctaattaccagatcgtttttggagctatttaggcatacgcttttaaggaaaaaagaaaaaaagagtgtaccttttgtttctaacaaaggttgttatctatattattgaaataaaaaattggggatagttatgacaaagtatttagaaataggaattaaaatcttaaaataacttttcatagcatggacaagacttattaatgtctacctcaataagcaaatcatttaaaaatttttcatgtatatttgctgccatgatgtgttgtgattgcttaaataaccaatgaatgaagatcaacaaggatttaaatgaagaagaatatggatttaactattttctcctgtgaaataagttcatatttacaagttttgattttcagaaattagacaattatttttaaaggctgggatgacaacttctgcctcttaccaagaagtcaaagcacagttatgtgaattcatcataaatcacatcatttttattatattttgtatttataattgtattgtgactactttaaaacctgttataaaataaaattgttttttaatattttattttagaattattagcattaataacaatttgaagtagtttacacaatacctgtgagttttatttttgttttatattgaaattaattttagttgctttacttggcttcattgctatggatgcattctctgtgttacgagttagcagatctttccttggaactgaatttaaaagcaagcatttggctccacttaaatctctgaaaatgcaacttgttctttgcatttattacataattcgctacttatggtacagaaatggatacaatacaaaaatatttccttataagatacactgtgaccaatgagctttttaaatagctgtaatcagtaacatgtatttgacttttcaaaacacatttctggagggatatcagtgctttatttccccaaatatctgaatccctatgctttagtacaaaacaacttctgaagaatttagtaaccatatgtgttgatctcttgtttttctaactagtctttcataagaaatgactagaatagcaacagggaaatgattgccttttaaggtttttgtttctcaatataaaattttggtgaaccatttttattgataaatacaggtatttttactttcttaaatcacttgatttaaaattactttgattaaatatgcatataaagtcagttgtttttaactctcaatacttatcaaaaaaatttaacttgctgtacattctgtataaacctaattctattcaactaaaattattttaaacatttag

SEQ ID NO: 3 - DNA, 24782 bp, Homo sapiens
  source 1..24782: mol_type = genomic DNA
gtgagtagttcttactgccctctaccttactacctttccacctttcccatttccatttgtttgttgatccatttaatctcaaacttacagaaaagttacaaggaactgggctgagcacggtggctcacgcttgtaatcccagcactttgggaggccaagatgggtggaaaacaaggtcagaagatcaagaccatcctggctaacacagtgaaaccccgtctctactaaaaatacaaaaaacttagccaggtgtggtggtgggtgcctatagtcccagctacttgggaggctgaggcaggagaatggtgtgaacccgggaggcggagcttgcggtgagccaagatcctgccactgcactccagcctgagcgacagggcgagattctgtctcaaaaaaaaaaaaaaaaaaaaagttacaaggaatttttttcttctctgaagtatttgagagtaagttgctgaccttaagtcctatcacttccaagtaggttcatgtatagttcttagaaacagattttctcatagcaaccgaacattgataaattacaatatctaattctcagacccctttcaagtttcacccgttgtcccagtattatccctccatataacaagatgttccaggctcaatacctgacccagcttcctttttttgaagaatggtgtttagaaatggagacctagaaattatatatgctgttattggaatatcactgttccctggtttctcagtggaaagagctaggaactaagtgttgtgaatgtttgtgtgtgtgcaggtgaatatacacacactgacatctgtattcctaaatcatgtgtatatttatttattaaaaactgtgagttgatgctgatacttcccattttaatccagcattacaaggtttgttctagtgttctccctttcgatatttgtcacttgctttcctgatagaaaacgggcttctagtatccttaatatattttcatattttggtcagtcctcctatacgtaacccaacttgaatgaagatatgtccttttccattgcagaaatgttctttttccccagctcggactcaacactacacaccaggccaccacatggcgccgcacccagcattgacacttcttttaccttgtctgggctctgacatccgtgccaggttgctcttcgtcatggagtcccttttactgagctctgctctgacgctttgtgccaggtgcctctccatctcatccttcccacccgctagcctctgcccgaccccagacagattccttcctcacctgaagccagaccatgcctttgtggagataccctctttaccctgcctgtgcttcgccagcctgcaccaggccaccctcctgcacagatactctcctcagtactggaccaggctaccaacagccccatgtgaacccattgtaacccaggtcaggcattaacacctgcagtaggctaccatggcttccccttcccacccccctagcttggccctactaataatcactttgtcactgtttggggttgatatttggttgtttcttgtaggttcctagctttaagataggattgcatactaaaatttacttagatctttgagaactcaaggaaatcagtgaaacattattgttattaaataaaaataaaatacctgtagttggtacctctgtttgagcctgccttgttacaagtttcactgacttcagcttcgtgtaacaaagtatctttttctttcaacgtgtacttaaatttcctgtcttattagttttctgatatctaaaaggaaaaaaagcagatatcgttaataaattagaaagaagttctgcaaatttaaaagtgccttctaagctgagttgtaggattacagtacaatccatagggttatcctgaagaagccaggcagggctcttctgtgttacaccctgtgcctgcgcagcatgctcaccccttgccatcagcgcttgcggccccattctctccctctagtaataatctaagttctgcattgctttctcctttccttttctttcttcctttaaatattcttctttcgagacatatctcattttaacttttattttcattttctgtcacttttggtttttctcatgccaccttggcaatgtagttaagtttgtgctaacgtagaagattagtgctcaaatctgaattgccatttactactagctgtgtcatcttcggcagggaatctcccagagccttagcttctttatttgtaaaatgactattatagtggttatttctcaggattgttagaattacttccgcaaacatttgcaagtccctggttcataatttcatgctaaattagtaccgttacaggaagtggtatatcattgtcacagtgtatacaaatatatttcttttatatccctcgtgatataattatcaagacagtgaaacaattcaatgaattttaccagcataacacatttttaagtgattggaaaatcataagtatcttttcttatgtttttagtagaggctttgcaaccccattactctccgctcccaatttgattatttaaaggaagtggattactaactcagatatgtacactgtcaagccaagttctatgttctactgctggttttcctgagaaagcagtcatataactcccttgaaatgatttactacttttgtacatataaaattataatggtgttaatgtaccaaataatgtccttggaagcaagggttttgccagtaactcagctgcatcagtcaccctcaaggagatgagccatgactttgttcattagttggaaaagagtctggagagtgccttttcgttactgtttatctttggtctgacacttgggaatagggtcatggatacttcagccagaaaactttccaaatttaagttattaatgtattataaggatcaaagtttctagtatagcctgttcaattagaacatagtgtgttggttgattggatttggagaaagggaggcaatcaaatttttactacagtttcagcctgttacagaatattgtatagagtgttaaaatgttgatgcattcatatttttgccagttttaagcttgtacgattttaaatcatttccttaccttggagacttcccccccacctttttttttttttttgagatggagtctcgctgtgtcgcccaggctagagtgcagtggcacgatctcggctcactgcaaggtggttctcccacctctgcctcccgagtagctggggctacaggcgcccgccaccatgcctggcttattttttgtatttttagtagagacggggtttccccatgttagccaggatggtctcgatctcctgacctcatgatccgcccgcctcggcctcccaaagtgctggaattataggcatgagccaccatgcccagccctgactgccctttaagatgagtacataagtagtagtagtacatttttctttcacatcctggagaagatatactgtgttcactattgaaatgaaaccataaagctagagttaggaagattgaagaaatgaaaaaggagctcacatgattttgtctcaggagaggctcttccaggattctttggagatatggtagattccatagctggagcagggaaaggacaggatgagcctgtgggtgtagaaaggaagggagtgcttgaaagatgatgaggagatgtcagcaggtcacagaaaccctctgaaggaggctccaactggccaggctggggacaatttgggccccaaaataatgacagtaacaaattgtaactcattgaatgaaataggaatccatacattggtaattatataaataagggaataaaaccatgatgcaaaaagggatgtttatgtcatcacgcaaaatatgttcacagaaaatatgtactaattaaaagagggaaaagagtaactttacagtggatgaagcctggcaatcatcactttaagcaagtggtcagagttaatattatcagtaatggtcaaatcaaaaccatatgcaagaagactctaaaatgcaagaagactcctgaagtacttcttaccaaagatgtagaacttaaattcagtcataacaatacatgagacaaacccaagttagagcacagtctgcaaaataactggcctgtaatcttcaaatgcatcaagatcatgaaagacaaggaaagagtgaagagctgctccagttggaagagacttaaaactaaatgcaatgtatgatcctagattggatctttttgctctaaggacattaatgggccagttagtgatatttgaaggggatccgagggttccattgtagtaatatatcagtgttaatttttaaatttttattaggttgggattattttggaaaataccattattcatagcgaatacaaagtagaatatttggggatgataatgcatgattacaacaaatgtttcaggagaaatatgatctttgtagtggtcttgcaacttttctgtaagtctgaaattgtttatgcataaaaggttaaaaaaaggttaaattttgtttttataactaataatggattagggtcatgtgaaagtactttagaggaaatgagacttttgagaacatcatccctgaagacgttgaaacactgagttacctcatggataatttaataggatatgcagctgatttttctaccttaatttcttgtttgcagtatctacccatacttagaattgtctggtgttaaaatatgcccactgggactttcatgaaattcttttgattttctagaaaattcagtttcaaaggattttttaaatagatattttaagtttggtgtcaacttagataaaatctgtttggagtcccagtgtaagttttagtaatgtgtccaatctgtttattgaaatagtataactttagaatactttctttggagagatgaagattggtatgttatagttcaattcaaagttgttctttctattatgatctattttataattcataaaatctatcttatgattgtcatcataagtgcaatttgttttttgccccattctacctcagaaactaagtatctgggcatcaataacaattggtagtagtgtttgctgctaagccaagtttcaccagtacagtgtggaattattttattgttttttctgtgaacattgtatctgctgttactaggttattgtgaggtattgggccttcatagaaattgcctggaacccttgttcactaaagcctgttacactttttattctctgtgcgtgtaatcagagacttattgatactgacacattcaaggggcattattgatcatttagattgctctaagacctaaggagtcttggccggatgcggtgcctcacgcctgtaatcccagcactatgggaggccgaggcgggtggatcacctgaggtcaggagttcgagatcagcctggccaacatggtgaaaccccgtctctactaaaaatgcgaaaattagctgggcatggtggcaggcgcctgtaattccagctactcgggaggctgagacaggagaatcgcctgaacccgggaggcagaggttgcagtgagccaagactgtgccattgcattccagcctgggtaacagagcgagactccatctcaaaaaaaaaaaaaaaacgaaaaacaaaaacctaaggagtcttttctccttattttacaataaattccttttgattttgtgtaaaaacttgaaactgtttatgaatgtaaaataacatttgaatacttttcttgtgccagatattaggttaaatgctttatgtgaattttcatttgattctcacaacttttgagttaggtagttatttttctcattttacagatgaaatggagggttaggaactcgtaggtagtagatgctgaagctgagatttgggcctgggtcttttcactactgtgccagaatcatttgggagggagtaaaaactcaagcctttggaaaatatgatgacataaaattgtcctttatattgagaagcttccatagttaccagtgtccttcacagggttgatcggaaagacatacatgttagtgatgatgataatgatgaagataatcattattaccacaggtacttcctataatataagcatctttcaaattgtatgagaactttcatagaacatctgagtaaatgaacagtacagtgtgcatgaaaccactaagcaaaccaagggaagttaattttctttatatgaattgtaaacatgtctctagatatcctttatcagattccaccatgcgtaagtagtgtctaagttgccccatatttagagtttttcaatgaggttgtgttcctacttagaatcctaaagttcagctataacagatatattaataaaatctgtggaatctttaattgagcataatggtggctgttattttaacttgaggctttttgttgagctggattggaagtgcaacttattagaaattacagtgtatttattcctatttcttgttctttatgtgagagaagatatactttagtagactgaatacttcagagctgtatctcatttaccaataaaatgtgaaaacagtggtaaattccttcacttgggctaccattgtacaggcctattttaatggtatagtttgatatccttaatgttaaaagcaatatagcttaaagaggctggtaaattagaattttccaatatcctcagctttttttcctctcacagttaatttgctctgctgactccctacgcgaggtggcaacagctggcccttttactggagcttgtggggattagagagtcgggctcgcagcagcgtgctcggcctcttgcctctgttgactgttctttattgtttgatgcctgagcatctcccagacagcgagcaattgtttctggaaacttaaagtttgtttctcttgggagtagacaatgcttttggggcttgtctttgtgtttcttcactttcccagtctcctcttatccttcatcctgtgctttctcttgataattagaaaggagcaaagataccacctttttatttaggtctgcatgagattctaaaacttagaagtataggctatagatgaaagtttcttttttcagtaagccacctcagtaacaaatcatgttttaaatgaaaactttgttcttcataatatcatttagtgagagaaaacaaatgcatgagtgcatttttgaaattatggtactaaaagggagcagcagcaaggtgacctaatactgccattttaaaagctaggattagaaatgtatcataactgcttaaatctaaaaagattctttcactgaatccaaaatatagttctaatttataggatagttataagaaatctctatgccatgtggaaacatgaataaaaagtagtcagaacatagctaaatagaaccctgaggtaggcagaatgattttattcttcacatttagaaaagaaaacatcaaggtaccctggaacttaatttctacagtgacttcacattccgacacttctcccatacctgccatacccttgagtgttgttacggatgagaatatcgtctgtgaagtagtatgagatggaaattttcctagaaagattattgtactcggaatttggaactgaaaagtgtagaaaggggaagtgatgtgtttaaaactgtttgcggaggtggggctctgccatgtgtattttgacaaagctacacaggtgattcttgccatccccgattaccgtgtacccgcctgcccctgagctggcactccaaagagttctttcagtgcatagcaagacaatttttcatgctattaattgggataaaattgacatacattcatttgtagagtctgagacacaacgtcactttggaaaatttggtgagcaatttgaactgcatctgcactggtgtgttctttttgtttctgtagacttaaccaaagaaaatgaactttaaagggactttaaaggcatctgcactggtgtgttctttttgtttctgtagacttaaccaaagaaaatgaattttaaaggaagagagggtgataccaagttgtagaattctaggtatgtaggttcagaggagattttttttttttaagaaaaaaaaaaaaaaaaaaaaaaacacccaatcaagaagaatagagcagggtgtcccgaagagaacgtgtgagctcgaagcatcccggcagcatctttcatatctcagtactgttgctctgtttcttgggctcacaacaccatttcctctctcctggcttttaacacatctcgaggcaaccttttccctttctttttatgcacttctctcactgcgtctcttctatatcatcatcacttcaacctaacccagtatttttatcccacctgcttatttaccttccttcagtgactaaaaaccttactcagatactgccagtgttgtttaattgagcagaatagaggcttctcactataggcaactgtaaatcaatgaaaataaccatttaaagaagaaaaacattttcatgtctatcacggtcgatcccttctgccaaagtgatttggttcattcataaattccccatacctcgtgtgttacatattgtactgtacacatttactgaatgttcgattgtgatcttgtaatacagactgttcattagcccccttctcttgacttaaaaagttggggggaactaactcttttcatcccaaggaaactttcttctactctgtcttgccagaaagttactgctcatttctcttgtagagcagcttgcctgtgtggcattcactcctgttctgcccactcccttcctaatatcgtgcagtctggctttcatctatatcaaaaccacttattgatagatcaccaatgatttcctaatgccagtctacccagttcaccaggaaactttaataactttttatgtttattaggaatttttaagttcattggaatacattcaagtactttttggaatgattatatgatgtagaaatgtgtatgtttgagagacagaaaaattgatttttttttcctcttcactacagaataaataatgtatttgttttatggtagcaatacttgaactctttaaggcatcttttcatggtaaatctggcaattttaaaaatctgggctttgtaaaataattttttttatagtaaggcagttaacacattaaagcaactaggaaagatagtgaagaattatttttaccttgagtctgtatagatgaagtaggctctgctttgtgttggaacagaacaaacaaacaaaaaaacctgagttgatacaaagataaagtaatcctcaaggaaagtcctctctgttagagaagtggttatttacacacagaattccacatgacaacgcctgagtggtgtggtttccaggttattgatgagaaaatcgagactcaaaatgggtcttttagaatgaagtacatttttcatggcctaagtctgtctttaaaagtcaccgttgtggccgggtgtggtggctcacgcctgtaatcccagcactttaggaggccaaggtgggcggatcacaaggtcaggagatccagaccatcctggctaacacagtgaaaccccgtctctactaaaaatacaaaaaatttagccaggcgtggtggcgggcgcctgtagtcccagctgctggggaggctgaggcaggagaatggcgtgaacctgggaggcggagcttgcggtgagccgagatcgcgccactgcactccagcctgggtgacagagcaagactcgtctcaaaaaaaaaaaaaaaaaaaaaaaaagtcactgttgaagaatatcaataaattagtacaagcgtaaaagaacattttcttttctataatattatacatgctgctggtaatcaacactttactagcaagtatattcttttgctttaaactcaagttttaactgattaagaataaagacaagaatgttctctacaataatgtatggattgaatttgccatttatcattttaatgtaggttttacttatatactattgtgaaaatactcttaatgtattcaaaaggccagtgcacaatttttttttcttttacttcttttttttttttttttttctttagaaagagtgtcacttgctgcccaggctagagtgcagtggtgtgatcatggctcactgcagccttgaactcctgggctcaagtgatctaatacctttaaagttgggaataaactttatcttaagcgtttttatttttaaattatgtttttgcatatttgatagaaaaagtagaatgtagtaattgaaaacctaatcacaaaacaattcattggactctgcaacagtatataaaaaataaaattaaacgagataggaaatcttaagggattggtggattgatgcacatgaaactggtaacctctgttaagtacagttctccaggtagttggagaaattagttaaatgtgaagagaattttaattttgcactattttgtacatttctaaactgtgtctcccacagcccttctcccccagtgagcacgattcagaattactttgaaatgttgtagtcttaattatcctattcatggaaatgacgaagctaatacacgatgtgctctatcttaaaagtaacagatattttcccaagtaacctactgctggttgtgatgctgagggacatttcatgggactgcatggtcgttgctcatcgtgataccatcctcagtggttgggggattcacagtgaattctcatatcctgtaactatgcatcatggatctatcatctgaaaataaatcaaaatctttgttgaactcacagtttccacacttgtatcacccatttaagattgtttcattgttacctcctgtgtacagaatatttcatttcaatttctcttagaacagctcattcatctattctctagtttcaatattctgagcagtagaagtttgctgttttgattaacttcagttagatctcttttctgggccaagaattaaagccattttatctttagtctctccttttgttggcactgcttcatagactgtgtcatatatacagatctgtctttagactgatctttaccaaagtacactactggaatttgagggtttttttttttaacatccttttcattatgagagagctagtgtatatgcattgtgggaaattagaaactatagatggcaaaattttaaaaaataattgccaccacccagagattgcactgtagtttaagacacttttgaatgtggtcctagggacataatttctggaacacatttttcgtgaagaggtctcaggttggcttcttatacccacagctcgttgtcattgcccctagttttaatttcccatcgctcagtgggctagattttttttcattttcttcatataaacttatttcagaaatgttcattaagaggaataagcagcattagtaaaaatgaaacctatggtacccattactttatatagttcaagtattctggaagccatattgtagcatagcatgtactgaaaatcactctcctttgaacagtaatcccatacctgtatttgggacctggccttcctttgtgtgcttgtgtattcattatatcccctttctctcttcaaagatgctcaagtcattctcatcttaaaactaatgggttgaaccttccatgcagtctagtagctactgtgaactctaatctctattacaaaggttagctctttgagtctcacttctactgaagttgtttttttttcccaagattactgaaaatttaagagaaaataatggcccaggcatgcattcaggactagaaaatacttccatgtacagaaaaccaaacaccacatgttctcactcataagtgggaattgaacattgagaacacatggacacagggaggggaacagcatacgccagggcctgttggggcgtggggggcgaggggagggaacttagaggacttaagtgcagcagaccaccatggcacacgtatacctgtgtagcctgcacattctgcacatagagcccgcttttgtttttgtttttgtttttaagaagaaataacggggaaaaaaaaggtttcaaaactcataaagaaagagaaagagagggagggagggagggaagaaaatgcttccatgtaactgcatcatttggtactttggagtccatatcctacttgaaactctaggatctggccctcacatttatgtagtgctttattttacagtttacaaaacttctgcttgtccatgtgtgtctgtaaagtcatatgaggcattatgcccattgttcagatagagaaattaacgttcattgacataaatggttaagcccattatgtaaatatttatggcaaagctggggctaatcatatgtgttacagataggactttttttaaagaattgtttaggtattctgttcatcattagtctctgggtttgtgtttgtggtaaccatagacaaccaagttcatataatttggcttcttttttatgtgatttttgatacgtgttaaggatctataacaatgaatttgcctcctaaagaggtacataatgttttcattcctccaaaaagataattctaggtttataaatctatgtatgctcagtgccagttgaattttgtgattgttcaatagaaaagaaattgtgacttaaaggtgattttccagtttaatggaataaatgaaattagtttagaagttatttttatttttctgagcctgattctcactcagttgtgataaacagcacctctgtaagataaactcggtgataaaccgagaacttctgaaatcagcctaacatgaatacctgttcttcttgtgctaagtttcataatgctttatcctaatacaccatttttttaagaaatggaacttgtatttcatttttgctttcatctcacctaattcataattttattaaaacctacgatttttaatttctttttttatgaatttttagtttggtgtataaatcagaattacattctctgatcttttacttttaaaattacagtgatgaactgactgtttaagaatcattctcatgattcattcgtctgttatgcctcctttttaaagcttcagcactgaaggtcttttgacaaaccaatatttataacagtttgacagcaggatgaggaacagcgtttgtctttgtaacagcttgaagaaagaccctttccaggacccagtcatgcagttacaatcttgacctctttcttatgctgggaacatgcatacagcagcacctcccatgtgttttcttgtcccattgactgtccattcacttcccatctgttttgcagtcttaaaggaacagaaggggccttcttataaatctgtctttgcaggtgataaatgatgcctacctctttaagagctgcctgggtggttttccttttcttagaacatttctgctttcctcctaactaaatcagggaaaaatacaattttaggaataagagaaaaagaagaaaagatgaatttttaaagcatttaattgactaagaatattttactgatcttttttaatcttcccaattaattgcctaaatcatattttttaaaatgtattatcgatatttagatttttgtcagggagtaaaatgaatgtattcattttgaaataatgtaactcttttttgagaaaacaaagccatgtatcattaatgagttaacatataaaataactttttaagttttttgtgataatttaagtgtggagcatcttatgtattggatacaaaagtaaaatatttcagagtaaatcattgtaatcttatggtaaaatctattcattttttacatttaaaaagatgatcataaatcccataaacatttatgcttttacttctgttgctgaaaataagtattgtaggaatagatattgatatcattgggttttctaagaattcagcagaaataaaaataatttactttttctcccatgcagaaattatttatgcaaggttttatgtaacaaatattgtccctctatggccctgcagaatattcttaaattactgatttaaaaactattaccagtataaaatgaccacttttagaatattgtggtgtattatgtgaatcagctggctaataatatatcttctgtggactagcttgttagtttgtttattaattccctggcatattccaaaaggaatttgaggcagcttacatatatcctacgcaaaagataaaactacttaagtgaaaaatttgggttgaaagaaaaggaaaatccaggcaagtgaaataaagtaaactttcagataaaattggtgcccctcaaagtgcatgctcaagggttctacgtacaggcagacctcattgtattgcatgtcactttattgcacttcacagttattgcatttttaacaatagaagttttgtggcaaccctgcattgaacaagcctgttggcactattttcccaacagccatgtgctcacctcatgtcactgtcacattttggtaattcttgcaatatttcaaatttttccattattattctgtctgtcatggtgatctttgatgtttgtattgtagctattttgggtaccactaactgtgcccatattagtcagtgaccttaatcagtaaacgtgtgtattctggctgttccaccaactagacattccctgtctctctcctcctcttcaggcctccctattccataggacacaacaatattgaaatttggccagctaataaccctacaatggcctctacatgttcaagtgaaagaaagagtgccatatttcactttaaatcaacaactagaaatgattaagcttagtaaaggaggtttgttgaaagccaaaatgggctattagccaaattgtgaatgcaaaagaaaagttcttgaaggaaattaaaagtgttattccagtgaacacacgaatgataaagcagaacagccttattgcctgagacgcaggaagtttcactggtctggatagaagatcaaaccagccataacattcccttaagctaaaacctaatccagagcaagttcctaactctattcaattctccgaaagctgagaggtgaggaagctgcagaataaaatttgaagctagcaaagtttggttcataaggtttaagaggaaaaaagccattctgcaacatgaaagtgcaaggtgctgatgtagcagctgcagcaagttatcaagaatatctaactaagataattgatgaaggtgattatactaaacaacagattcttgatgcagatgaagtagctgtctattggaagacgatgccatctagtaatttaatagctagagagaagtcaatgcccagcttcgaggcttcgaaagagaggctatcccctcattttgggtgccaatgcagcaggtgcctttaagttgaagccaacctaaagaatttaccattctgaaaatcctagggcccttaaggattatgctaagtctatcctgcttgttttctaaaagtggaacaaaaagcctggatgacagcacatctgtttacagcatggtttactgaatattataactctcgagacctgctcagaaaagttttctttcaaaatattactgctcattgacaatgcatctggtcaagcaagagttctgagggagatgtacaaggagatttatgttgtttttgtgcctgctagcacaacatccattctgcagcccatggatcaaggaatactttcaaccttgaagtcttattattttaaaaatacgtgtcttaaggccctagctgccatagatagtgattcctctgatggatttaggagaaaaaaaaaggaaaagcttctggaaaggactcaccattttagatgctgttaagaccattcaggattcatgggaggaggtcagaatgtcaccattaacagtttggaagaagttgattccaaccctcatggatgactttgaagagtttgggacttaagaggaggaagtaactgcagatatggtagagacagcaatagaactagaattagttctgttgtaatatgataaaacttgaacagatgaaacattgctttttatggacaagcaaagaaagtggtttcttttttcttttttttttttttggcagtctcagtttgaagaaagtggtttcttgagatggaatctgttcctggtgaagatgctgtgaacattgttgaaatggcagtaaaggatttagaatattacataaacttagtagataaagcagctgcagggtttgagaagatagtgtcccaatttttaaagaagaaaaatttgagtaaatttgggtaaaatttacccaaaattacctattgtgggtaaaatgctatcagacagcatcacatcctactgtgaaatctttcatgaaaggaagaatcaatcagtgcagcaaactacaattgttgtcttattttaagaaattgccatagccaccgtaacctgcaacagccaccaccctgatcagtcagcagccatcaacgtcagggccagaccctccaccagcaaaaagattatgacttgctgaaggctcaggtgatccttagcatttgttagcaataaagtacttttaaataagttatgtacattgtctttttagacataatgctattacacacttaatatattacagtatactgtaaacgtaacttaaacgcaccggaaaaccaaaaaaccttatgtgactcactttattgtgatatacgctttattgtggcagtctagaaccaaacttgcatatctcccaagtatgctgggactttgctagaggtaagctgcaaatttagccctcagtttcctggtggctggcagttacaaaatggaaagcagaggtcattccatcattcatggtggccatcagacaacaacacagcagttgcttaggagaagcatgggtcttcttcgtacgcacaactgagagaaatttcccttaaagtggacactgagttagatgatacaatgaatctaatggctacacataatcatgaaaatcatggggccctttattgtaatgtttctcatgcgggctaacatgcgtagttctagggaaaatatgatgctgtccaaacatacagctatttggtttggcttatctaaagataaaatacatagtatccagagaaatagatgaactgtatgtcctccatacagtctcccataaatattatttctttttgcagctgatccttttagtaaatatcaggtagccagaagttcaagattttacactcattgacattgacaagcacctggaatggtactaccttttttttttttttttttttttgagacagagtcttgctctgtcacccaggctggagtgcagtggcatgatcttggctcactacaacctccgcctcctggattcaagtgattctcctgcctcagcctcccaggtagctgggattacaggcgcccgccactacgcccggctaatttttgtatttttagtagagatgggttttcgccatgttggccagggtgatcttgaactcctgacctcatgtgatccacccgcctcggcctcccaaagtgctgggattacaggcgtgagccactgcgcccagccaagtactatttttattagttaagtcagagccataatcattataactgagctgaaattagaattgccatccacttaagaaagttgagtggtctaacaagtataaaagcctaaatataaggctaattcatgttcatactgaagccttttggggaataggccttaaaatatgtagaaagtatttgaagcggttttaattgtactagccaaaaggagcctagtagaaatgcttgtgttataagagtttattttttaaaaagctgaatttatctgaccaggcgcggtggttcacgcctgtaatcccagcactttgggaggccaaggcaggtggatcacgaggtcaggagtttgagaccagcctagccaatatggtgaaaccccatcactactaaaaatacaaaaaaattggccaggcatggtgatgcctgcctgtagtcccagctactccggaggctgaggcagaagaatcatttgaaaccgggaggcggaggttgcagtgagccgagattgcgccactgcactccagcctggacgacagagcgagactccatctcaaaaaaaaaaaaagctgaatttatcaacaaattgctgtggagttttttatatattcagcaggcatcagttgtaatttacctcacagactttcttaaggttgctttctttctaaattatactttatgggggtcacaaaatagcaatttttaaataatcacctttaatgattaagtattgtttaagtcagatcactcaactatgaatgcatgaatattcatggacatctattacatagcaagcagtgctatgctgggccgagtgattttaaatgacagactttttggtaagtagagaatttacccaagcagtccttgctgttctccacattaatgctcagaaaaaatacattataaaaatgatctttccaaaatgaattatgaagccccatgagaatgatatggcaatttgtggttacatattttactagaggattaatatccaataaataaaaagatactaaggaataaacaaaaaaaatttaaaagatgaagtatataatgaattagaacaatacattttaatcataagttttaaattagtgtggactttgaattctcctggacagattccttcattttatagataaagctaggactgtgacttatccagttatgaggttaacggcgaatacaacattgtcatatattttaaatgacacacattacaacatgttctctgctttataaaaatcatatcaaataattgccccatagattattaaaggtgttagactagggattcttaaaaaaaattttcatcaaatgtttctttcattattaatcccatgaagtccatgttacagaagattttgtctacaacagtgcagttacattcttctcgttagaaatacaaccaccagttagagttcctaatcagtataaggaagtagttgttaggagaggggatgggtttcttgtccaaatgaagttttccatttgagtttttgaagtagtgaaactaacccagcgtttacaggccccagaaatctgggaacctcagctttcaaagtactgtaccagtctttaacagttttcctggacgtgtgaattgatgcctccttctgtaacatgcaggagtgttctgtctgtcttcattgagtgttaaaaaataatcatgcctatttcaaggaaaaaatctacagaactaagatgcagaagataagtgctagatttaatcatattccttcatctatctgtttggttcaacctttcatcaactaaaagatgcaccttttttcttgtgctaactctaagattttagctacagttttgagaatcttgagtgtagtctcttgtttaccttttttcctttttttgtttcccccacaccctagattcatttaaatactgaacttctaaagggcaagtatatagtgtagtttaataaaaagcaaaccttttcatgaacaatatatattacataataagaagcgttcctttacttttcagtactctagtgaatagctttctacagtagaatctcacttagagggtgtcttaaagcttaacaccaagtgctcaggcagcatgttatacaacagttccattaaggtacatttggatctttggatgtgtggtttgcttaaagtacactgcattagtaagttggcagcttgctttctttaaaaacatcaaaagttttaaaaggtttatttcagggcatgtgttagtgttttgtgtgtggttctttgttcctgttctaaactgttattaaccactgaagtgaaccttctcccgggtttggccttttggtattcacagtgtattcaaaacctaattacagattagtctatatttgagacttttagagcaagtatcagaagacccaaaaagaaaatgagagtagcagtatcatttcatgtagagataaagagacccaaaacatgaatgggtgtcaagtcagctgaagaaaagaaaaaagagaaggaacttcattcactgagacggtttatgagttggggattatgggaatattcatgactcaatcaagaagcacagtgaattgatgtttgaaatagctcatcttttaagtaaacattggataaatggaaagtagactcagtattcactacacgtagaaatagctatttctgtatagcagaaatagcagtttgttaatcccttcctgagttggtttaatttaccaagtaaatcacaaattttattctttatttgtgaatatttaattcaaatatttaatggaaatatgagtttgctttataattagtcatgctgatccatacacgtatttctgagagaaagcaatttctaatggtgaaatagttacaataatatttttgaaatttgaaagcaccgtgatactgaagcattaatctgaaggatcggaaagtagggagtttttgttgccaacatttaacttcattgtttatggataacttggttttctgggcagccagatggcacagttagtatacagacattcttggaaacttgtatcaaaatttaaaatgaatgaatttatgagaaataattctgcttattatttgtaatgtagctttcttgaaaagcaagaaatcggaatgtagtttctaaagctgcaagtgaatatgtatacatagccagctctttcagccttgataataaggtgcaaccattaagatgaagggatttttttttcccacttgtgtttttgggcccgagtatcctgatctgtgttgcttgtctggttcaggtgtgagccaccagctttctttgactttcattatctatgtgtatcttgcctcctgttcccaggcttgctctagctcttctgatcctgtcttcctccctcttgatcactagtgtagtattcatgaagccagctaagttagtttttccctttgaaaaccacagcccttatcttctgtgccatattttgggcaacttcgtttatcattgattgaccgtacgcagtgatcaggccttgttctagacactgaagactctgagcatttttgggcccattttgtactcctgtattgttctccaggggcttctccaagtgtgcgtcaatttagtcttctcaagagggcatcattttcatcagaatatgatagcatattatggagtgtccggtcatccttaggcatagactacttaggaggtgtaactgttttgttccctgatttttactgaaatgggtcttttctttttttttttttttttttttttttttttttttttttttttttttttgagacagagtctcgctatgtcaccaggctggagtgcagtggcatgatctcagctcactgcaacctccgcctcccgattctccctgaaatgcgtcttattttaagtcaaaggtaatacttaaaaaagaccaaagagacttaaaataacagcatttgcttcgtcactatgagctttgttattatgagttaacatacagtagcagactgggtgtagtagctcacgccctgtaattccagcagtttgtgaagccgagtggggaggattgcttgaggccaagacttcgagaccagcctgggcaacatagtgagacccccatcttgacaaaaaaaattgttttaaattagccaggtgtggtgctgcatgcctgtggtcccagctacttggaaggctaaggtaggagaatcgcttgagcctgggaggtcgaggctgtagtgagccgtgtttgcatcactgcactcctgggtgacagtgcaagactctgcgtcagacaaacaaacatcgtagcagatgtgtttcttaatcagagaagtgtagacaaggctaactccaggctttaatgtcctcatatttagcaatgatacctgcaaggttgtatgagaaccaaatgaaacgccaaatttggaaatacatagtagatacatcatagcagagtaagccaggaatgcttctcaaaggtaggatatcatctgtgtcctcatatcactttatgaagtacattgtgaaagtgaaagaacaaagaaataaatgttttttagttaatgtttaaaggatacatttatcataattgctcttttaacactcacctccagtctcccctccgttcacacctcctacccccattacttcctggtaacttagttaagtgtcctttgtcattcctgaggtttcaaggcatggtagtactgtgtcctgatattctaatcgtaaatatttaagggaaattcggcattttttcattttgtggttttcatattaaagtacattaaatagtctttttgcttttatttaggaaaaaaactgcttacctgttaattttagaaaaatctgattttcatttagaccttacagggtgagacacctgcatcagggtggctcttggtatctttcaattcaattggatcttctctgaatagtctcttgtagggagtgaggctgctgtaccacctccctgcagtagtccatccagcttaagatgggggtcaccagtaggccaaaagaatgggtagacctggccatgcactgccctattgtactcaaatcgtgtatcaaatggagttggatttcttctcttcatacagtacagcatttccaagtagaaatatttctcaatgaaatgtggagagaagcacccgtttgagattcccgtgtgttgtgtgatttaagttagatggttttttaagaccacattcatttccagcattctaggtaacaatttagaaaatgtctttctcctaacctccccactttttaaaaatcctccaactgatgaactgatgtgaaactttcttacattcactgaaaaaaaaaaaaaataggttaagctgtttctaagcaactagatgaattaatttttaaactaagaatgtggccttattttgggaaaacaagaatatttacttgtttgtctgctgtttaaaaaatggaagtcagcctaccaaaaaattgagactcaacttctaggagatgggttaggatttttttttttaagtttctctagtttaattttatatataaggggttaatgctaccttcataataactattatcatattttctcaatacatagcttgattaaaacaactggactccccccccaccccaccccacacacacacagattttatatcagtctgaatctaatgcctagaataagaagtgcttcagccaggcatagtggcactcacctgtagtctcagctactcaggaggctgaggcagcaggatcaattgagcccaggagtctgagtctagcctgggcaacatagtgagacctagaagttttaaattactggaaaaataatatgaaaagaataaattactggaaaaagaatatgaaaatgttacgttctttatatccaaccgtggtaggcttttttgagttcctgcaatgctaataagaattcataaaaaggacaattcttcattttcttgggtactcatcactaatagctgcctcgctggtaaaaaggaatacatgtatcttcaattgcagattatttacttttaaatataaaagatataaatgtcaaatattaaatgcatcttacatggttttcctacatagtgaaagtagaatgcttgccagttttgcctctaggtcactcactttgaaccagccaacccaccttaattgatcatttccactaatatgttaaattaccttaaaagaacaaaaatatttatcatgcttactataacctgtgttttaaaataggaggccaggcacagtggctcacacctgtaatcccaggactttgggaggccaaggcaggaggatcacttgagcccaggtgttcaggaccagcctgggcaacaaagtgagatcctatctccacaaaaaaattaaaaataaaaacttagccaggcgtggtggcacgtgcctgtggtcttagctacgtgggaggccaaggcgggaggatcacctgagctcaggaggttgaggctgcagtaagccctgccaacaccactgcacgccaacctgggcgacagagtaggacccccatctcagaatataaaataaagtaggaggtgcatgtgaagtagtatagatcatgacttttccaattttaagaggggattggcatgtactatgagcagttcacatttgtggaggaaatctacatttcagagagtatatatttcatttggaagtctataaacatgaaaacctaaaataaataatgtaaatctacctctagtggctctggtatttttaaacttatttatagctggcaaagtacttttttgtatgtatttttatagcaccattgcacttctcatgtttgttgcaagcatctcccacagcttcctttgtcttttaattttatgacatataaataaaagtatacatttcaatatggccatattgattgatcttttcctttgtaactcttactactttatatttaaaaagtcatttcccagtctaaggccacctctattttcttttagttttttaaaatggtttcattgttttatatttgcctatgatccagacattagtaactgtgggttcttaattgggcttcagagaatctgagaattccttaaaattctctacataattgtacatgtacttaatacatgcttttttccatgttaagagtccagagtttttgttagatcctcaaaggggtcagtcagtctctcctcccacttccaaaaaatgtctgagacctactactataatccatctggactttatttgggtaaaaggtggtatggtgagactcatatttttctttttcccgcaaatagttaagtataccaaccatttagtaaataattacctcctgatttgtgatacctttgaaaaataaatgtttttctttatttttatctccacag

SEQ ID NO: 4 - DNA, 5409 bp, Homo sapiens; identical to SEQ ID NO: 2
  source 1..5409: mol_type = genomic DNA

SEQ ID NO: 5 - DNA, 21301 bp, Homo sapiens
  source 1..21301: mol_type = genomic DNA
gtaagtgcaggctctaatctggccccgttaattctggggcctcttgagagtggggctgtcttatctctatctccaaaaatgtgcaggtgactctcaggccaggccgacggcagttggagaattcccagatgttcttgaggacccagaatgacaggagccctggctgggcttacgttcggagccggcttcaatactggcccttttctctggccctacccaacccgaaaattctggacgcctctcaatcttggcccgtctctattgtccttttgtctctgccctttacacccttgtgtcttcagtgttctgtctgtctctggttgcctcttttgccttttttctgtcctctccctgccaggtttggctctgtccatgagtcacctctctccacatttctcctaactctcggtgtcttctttttcttccatttccacgccatgtgtacattgcatcttcaggtacctgggctcttctatcggggaaaggggcgtccgtctctttccctagcccgctgatagaagtcagaactagagcaatgacgcacacggtgtcagagacggtgattcgagatgccctttcaatagcagcttttttctgtgtttcgggagggagacttactttttgatgcaaggtcgtgaacgtggcaccacctttctaatctcaatcattgttgccctggggtggtttaattctaaatagaaaatcatagaaatcttttcatttctgtgcgttactatatgcattgtaatgagattaaattggattttataggaaattttgttctagtatcattagataccttcaagcttagctcattgttgcaggcatttgataggaagtaagatgcatcaagcaaaattggaaaaacgtggttttcctgaattaacttctaagcagttgttttgaattttttccagacctttttaagtggtatagataatttatcgtgtttataaggaatggaatgcattcgttagtttgtttttgttttgttttgagacggagtcttgctctgtcgtccaggctggagtgcagtagcgctatctcggctcactgcaacctccgcctcccaggttcaagcaattctcctgtctccgcctccggagtagctggaattacaggcacgcgccagcacgcctagctaatttttgtatttttagtagagagggggtttcaccattttggccaggctggtctcgaactcctgacctcatgtgatccaccctcctcgacttcccaaagtgctgggattacaaccgtgagccaccgcgcccggcccaatttgttttatataggttaactggagtccaaaatacagaactagatgagataacaatagttaacagtgttagtcagttagaattattgcataggtatttttaatctcatggaattttagtctttgagtaagttcacagcccttggtattaaagtaagttatttacaacccttgcatttctacttctcaatatttagtgaggaaacatatctgattttctttaaataaaaagagaaaagactgcagaagatagcattctctgttggagcaattaagatgtataagaagaactacaaagacggagttttaaaacaaactgatttataagtggtatttatttaattggctgtcattgggctaaattatttctaaagttaccatggatgccattgagtcatggcttaaaaatgtctcctggtgatggcacagtttagctacctaaagaagtagagatgtgggaagccagaagccccaagctctgcagtttttcttttgctatagttcctttgcatgttgtgaaagaatacagttaaattcctgctccctaacagatgagagcataagcatttctttgggcatacatatgtaaatacatgctcatggacatgtgaaaagatcaatactaacatttgggtgcaataaataattgtgtaaaattatttttaaaagaattacatattaggaaatgatatattgattaaaagtgatagtcaatgaacaagagagtagatttctgggggaaacctattttgcatcatacttgatttttagttttgactgaatattgaagtctatattcaaaattcttttcctttagaactgtaaaggcattgctgcattttcttctaatgtaattgtttattgctgctgagaattcttatgacaatctgattttttcatcttcatgattatcttgtttttcccttcatggaatctgttagggtcttgactttatcctttatcctaaatttctcaaggcttggaccaggtgtgggtttggttttgttttcttttgctactcatttgacttggcacactcagtgggcctttccctttatctttcttcatttctgagacgtttttctctcttattttttattatcttcctttcatttttcctgtcctttttctttctagacatctcttaggaggatagtggtcctcttagattgatatgttatgtccgtgatttccaaagtaagatttgtactcgtcgtctgttaaaaggaaaagcatacatataccctatgtatatatgcacacttttttatttttaaattatatatgtatctgtactaattatttacattgtaagtcaaccctaacataatcttaaaggataagatacaaaacatactgcatctagaagcttcagtactttcttcctgaatcccagtagatccttttgttcatcccacgggatgcattccgcccccatcctcccactccctttggataccacattaccacagctctgcatcacttaactttcctcttatgtttttcaccttttttttttttttttttttgcattttatgtcctggggaatttccttaattcatttcatggttttactgttgatttttttaatattggccatcgcaacttttcttttcttttcctttcctttcctttcctttcctttccttttcttttcttttcttttcttttcttaattttcttttcttttcttttcttttctgttcttttcttttcttttcttttcttttctttcacacaggatcttggcgtgttgtccaggctggcctcgaactcctgggctcaggtaatcctctcaccttggcctcccaaaatgccaggattacaggcgtgcgccactgcatttggcggcaacttaatttttttatttttatttttccttttagaggacacctagcactgagcattgcaacttttcatttccatgaacttttaagaaaactcttaaagacatgtttaattctgtacactttctattgttctttgattgctgtttttgaataacaacaaggagtacgccttagcattttgatggtatcctcttaatagtcgcaataatagtccccttggcgctctgtatactctcaagtcttaaatgttttgtatgcagctgtacgttgacagttgaatggtctcgctccaagtggatcagcaagaacataaagaatcatttaactggtacaggctgcggcttgtgaattccctattaacaccaaagaagacgtgtgagactccgtactgaaactaaagacgacttgtgagttccacactgagatcaaataagtctttatgatggtgacagagagtggtgtcaacgcctaaagttttggttaatctctctaaattgaggggctgaccaaaagggggaacttaactgtattagacataattttgagaaacatgggtatgtggatggtaatggaggaaatgggtgtagatgagattgcctagggagagtgagaagtaggttaggtctaagccttgatgagttcccaacatttccaagggtagttgaggatactgaaaatgagtggccagtgagatagaggtaaagctagagactgcccaggggagaggaattttcaacaatgaggaggtgtcaacattgtcaggtattgctgagaggtcagataaaaccagaattgagcaaaatggccattggaagcctatggtgccctccgtaagagctgtttcgctgaagtgatagaaacggaaatcaggctgggcacagtggctcactcctgtaatcccagcactttgggaggccgaggtgggcggatcacctgaggttaggagttcgagaccagcctggccaacatggtgaaaccctgtctctactaaaaatacaaaaagtagccaggtgtggtggcaggtccctgtaatcccagctactcaggaggctgaggcaggagaatcgcttgagccccagaggcggaggttgcagtgagcagagatcgagccactgcactccaacctgggtgacagagcaagactccgtttcaaaaaaaaaaaaaaaaaaagaaatggaaatcaggatggtttggcttttattttaataaaatagctagagcagggaaatggggtactttttttcccccttttaagatgagacatagccaggtgcagtggcttacacctgtaatcccaacactttgaaagggagggtcgcttgagctcaggagtttgagaccagcctaggcaacatagcaagaccttgtctctactaaaattcaaaaaaaattaactgggcatgctggcacacacctctagtcccagctatttatgaagctgaggcaggaggatcacacttgagcccagatacgtggggctgcagtgagccctgataatgccattgcactccacgttgggcaacagagcaagacttcgtctcaaaaataaataaataccctgtctcaaaaataaaaaataaatatgggaggagagatttgacttagattcctcaaagggcaggaggaaagagaattccaaacagtgattcacctttaatgggagaaagatcgcttaattttacatgaggaagaagaggattggtggagatacagtaggtgaacagtttttgtatgaggaagttgaacatgtgtcattctaatagcttccattctctgtgaagtagagggcaaggtcatctactgagagttggggaggtcaagagagataaggggagattagaagagctcttctagcagagagtggaagaatgaattgctaagagagatgaagtaggattgttaagtagttttgagggccctgttgagatgtgcttccagttgggtgtgattttctccagtagtgctttatttccctgggtacaggcagagagaaaaacaataaggctcatgtagggtttgtattttgttggacaagtcaaacagaaaagtcagaggacgagggagtttagaatgtttgcaaaagagttattgaaacgatgaaccgcataatctaaggtggtaagtgggtgaatagataaggaggatgtgaataggtaaggagaagaaagaaatatcagattattgattattgatggcgactctctaatacagctattatgccattttaaccgattaagaaactaaggctttagaaaattcataatttgccctaactgcacagctagtaagcagtggaaatgtgattggaaccagagttcttctgactcaatagactaaatggatgtaaggatgtagttgaaagaagggtgagctaaacgttgtggaaccatgagctctttctctggttgatatccctctctgtaagtgataacatgggtcacgctggataaaaccttgtggtgattggtgactttcctttgtccttcctcctgtgcctagtctggcgagtatctgcctttccctttcctttctcattgctgccacctaactttaggctcttccccttacatctgggtaactgaaataagatcacctttttgttccccttctgatttactttgacctaacattatctttactattttctttaaattaatgtttcattagtcttattctactcaggaactctgtagttccccattgcctacgaaaaaaagttaagcctcagccttatattcagtgactcttcaattggatattcagtccagttttactcctcctatgagccttctatgccagctccttgggtctcttgccctttcattgtctcagctctgcacccttctttctcttttttattcttttttttttttgtacttttttggttttctttttggtttctttttttgttttatttattaaacctccatcacacttcatcctatggagttttgaaccacagcaaggtgcagtatcatcctggggctctggaggaagtggcagggagtccaaaatgtcaccttagcttcttatctggggccacatgtatttctgcatctgctgcttcccacactcttgcccacaagtgtcgcttgtggaaataatttgagatttactgtctggctgaccctagtttcaatctcttttccaccatttgctaatcattctaccttgggcaaaacatagaattaaaagaaaacttcagacaagttaaatttgatggagtttaattgagcaaagaaaaaaaatgatccacaaattgggcagtctccagaatcaccgcagattcagagagactccaggggtgcctcgtggtcagaacaaatttatagacagaaaaggtaaagtgacctacaggaatcagaattgagacatagaaacagtgagattggttacagctcggcgtttgccttatttgaacgcagtttgaacactcagcagtctatgagtggttgaagtatggccgctgggattggccaacactcagctgttattacagatgcatactactaagttaggttttcgattttgtctgcctatttgagctaggttacagttcgtccacaaggactcaaatataaaagtacggagtcctcttcgggccatatttagttcgctttaacaattcccccttttggtcagcccctcaatttagagagattgaccaaaactttaggcgttgacaccactctctgtcaccatcataaagacttatttggtctcagtgtggaactcacaagtcgtctttagtttcagtatggagtctcacacatcttctttggtgttaatagggaattcacaagttgcaactttgtaccagctaaatgattctttatgttcttgctgatccagttggagtaagaccattcaactgtcaatgtacagctgcatacaaaacatttaagacttgagagtatacagtgcaccaaggggactattattatgactgttaagaggacaccgtcaaaatgctaaggtgtactccttaataaaagttcttatgaaatgaactgaaccaaatcagccaagttaaggttcagacaatataagcagttcagcagtattggggtctgattggtcagagtcttcagttggagtatgatagtgattaaggatcatagttcgctgtaaagtagcttgacttaaagaggtgctcgttttcattgttaccttgttaatacaagtcataataacttgaaaacctgctagaagagatataaagattagaaacccttggaaaacccaagcttgccattcaccacttaggatgcctgcaaaccaactgttagttgctcctataaacatatcgtgggttcctttctcttgagagatttctttattgtacttggtggcagtgtctaaggaaacagcagtatcagccaccttttaaattaagctttttgtagtaacagaatcaggggagggattagtacaaaattcagttttgtttaacaccaaacataggcctccagcttgagcaaaaagaagatctaagactgcatgatcttccattaagtgttttcgttgaatatgtatgttgtcatgtgcctttctgagagtagcttctacccatctgaaaccctgggaggtctgattggctaccaaatccaagaattttcccaatatacaaattagttttaaattccgtacaaatggtacttcactaccaccaagagtgagcccccaggaaccccagtggaatctttccccggtagaaactagcttatcctcgtctatttcgaggctagtgctaatttcagttattgatcattttggcctccaagtataagggctatcatgagaattttcaggggaagcaattcgaaaggcaggagcaggccaggccagataacaagaaccaaaccaaccaaggaggcagaacagaatatgcagattctccacagacccaatagagaccctcaggggttggaaaagggggccacctagttgtatttgagcagggatcattcaggtttgttcgaccatgaatctgtagctcctgaataacatccagtgggaaatttacttttctatggcccctttgtagtgtgttgtaagggtgtataaccacatctagtaaaaagagaccctactggatatacaagcaatcacttgtactaacataagtaattcccaaatcttgagtatgtgatgcctgcaagcacaatatacgttttgtaggcatcatttggatttgttttttatatttggtgtgatcgactttatcagttgaaaaagagtgttgtttttagtgagtgtaggaaagcaagtactagtgatgtttagagtatcaagaatagctttccattcttcccttggggtttcagggtgactcattgggaaacgtggaggggcactggcacccttggaatcatttcctgattttttggcattagcccacaaacccaacagttaccctggttttgtgctagagcataagcttgagctgaagccatccactgattatggtcccatggattttcatgtaaggaaaaggaaaggattagggaaaaaaataaggaaaacagaaaaacacataaggctttcatggtggtagagaagtcttgatctgtgatctagggaaagctgtctgtaaccaggatgctgtctgcttctgggaagagatttccctggtcagctttaccttaaagtctccaacgggtatatagtaccaggagtctgagggggcccttttgaattgtgagatgtggacccatggttcaaagccctgaagcttctctgcactgtgggtggtaagaaggacttggtatggtcccatccaacgaggttcaagagtgatcttcttctgatgtcatttccggaaggcccagtctccaaattccagaccatggagggtttgattgtcctcagttggtggatcttgaaatgcttcctttacctggtggaagtatactttggcgtaatacattaaagccttgcagtatttagtcatatcagagtttaagagagcaggagaagcatgagatgctattattagggacatgggcctcccagtgactatttcataaggggtcaatttatgttttccaacaggattgaatctgattgccattaaaaccaaaaggtagtacctttggccaaggcaactcaattgattcagttaacttggacagtttcagttttcaaatgccatttgttctttcaagctttcctgaagactgagggtaataaggacaatggtaatgcaactgtgtcagtaacaccttatttaactgctttataacttgctcagtaaaatgagttcctctatcactggagacttttagagggatcccccataaaggaaaaacattttctaataatttcttagctatggtcacagcatcagctttcctacatgggaaggcctttatccaaccagaaaacatgcaaactattacaagaacatactgataccccattgagggtggtaactgaatgaagtccatctgtaaatgttcaaatggtccatcaggtggtggaaatatactgcctctagtttttctgggattatgagtttgacaagtcaaacattgattataagccattttagtaatgtcagaatagtcaccccaccagtattttttcataatttggatcactttgtctgttccatgatgagctgtggagagctttcaataatggaagcttcaaagattcaggaaggaccaggcggccgtccgggccctttgtgagtctttgcttcacgttaaatttacatccttttagataccagttttgtttttgcaaatcagatgcgttgcactgtttattaaataggtcatcgtaaggaaattggcttggattaatcttatggagttcattcagattgcgtatcttgatggttccagcactagctgattgagcataaaaatctgctaaagcatttcactgatatttgggttcatttctacaagtatgagcttcagtcttaataacagcaatctgcatttgtaacaggatagcagaaaggagctcatctgtttggagtccatttttgatggggatcccactagaggtgagaaaccttcgtagtttccatatcatgccaaaatcacgtactactccaaaagcatgtctactatccgtaaatatttactgacttgtccttagctgtgtgacatgttcaggtaagggcagaaagttctgcaggttgggctgacttgacttgaagagttcgcttctctattaactcattttgggtggtaacagcatatcctgactgatatttttttttctgagtttttggcataggacccatcaacaaaaagtgttaattcaggattatccagtggagtatcttgtatagcaacacgaggggccactatttctgatactacactcacaccgttgtggtcttcaccatcatcaggcagagataacagagtagcagcattaagtagattacagccttttagatgaagataagaaggagataggagaagtaattcataagatgttagtctactcactgaaaaatgctgggtttgattggaatttaatagactttccacagcgtgtgggacttgcaaattaagttcatttcctaaaaccagatctgatgaagcttctaccagcttggctgctgctactgcttttaaacaattaggatatgccttagagactgggcctaattgcaggctatagtatgcagtggtcctatgtttagcaccgtgttcctgattattacattcatgaacaaacaaagtgaaaggtttagtgtaatttggaagtcctaaagctgggggctgttgtaaggccaacttcatttggctaaaagcctgctcatgactgtcttcccaaggtaaaggctctggtacagcatttttagtgagctcatacagtggtgaagctattaaggaaaaatttggaacccaggatctgcaatatcctgcaagcctaagaaagccttttgtcttttggttgcaggtcgaggaaaactttaaataggttttatcctctcaggtaagagggaaatcccttcagcagccaagtcatgtcccaaatagtggactttttcttttgaaaattgaagttttggccaggcatggtggctaacgcctgtaatcccagcactttgggaggctgaggcaggcggatcacctgaggtcgggagttcaaggacagcctgaccaacatggagaaaccctgtctctactaaaaatacaaaattagccaggcgtggtggtgcatgcctgtaatcccagctactcgggaggctgaggcaggagaatcgcttgaacccaggaggcagaggttgtggtgagccagtatcacaccattgcactccagcctgggcaacaagagtgaaactccatctcaaaaaaaaaaaaaaagaaaaaagaaaagaaaaaattgaagtttttccattgaagccctgtgacctttatatgcaagttgctgtaaaaggtaaactgagtcaatttccgggcactccttaataggagagcataacaataagttatctacatactgaatgagagtagaattttgaggaaactgtagtgtcattaactcctgatgcagtgcctggggaaaatatgaaggggcttcagtaaacccttgtggcattacactccaggtgtattgctgatttttccaagtaaaggcaaacaagtattgactttctttatggaatgctagagaaggctgagccaagatctattactgtggacaacttggaatcagtgggtacattaggttataaagtattaggatttgggactacaggaaatcttggtattacaattttattaattgcctgtaaatctggaacaaatctccagtctcatccattttgttttttaactggtaggattggagtgttacaggggctggtgcatggaattatgagtccttgtttaattaaatcttctacaattggtgagagcccttaaattgcttcaggttttagtggatattgtggtaattaggcaaaggtttagaatgatctgttagtacttttataggttctacacttttaattcttcctatatcagttgggaagaggcccataaacattaggtgttttcgaaagatcaggggtattacaggcttgagtttcgatcttatcaatttctgcctgtagacagcataacaattctagttcaggagaatcaggaaaactcttaagattatttctgtttctgaggaaaattttaggtgcccttttagctttgaaagtaaatcttgccctaccaagtttactggaacagtatcacgtagtaaaaaactgtgtttttctgaaagggggctcagagttaattggatgggttcagatatgggaacctctggaacttgatttgaaacccctgtcacagaaatgacctttttactctaagggatttgttggcttattaaggtggggtttatggtagatagagtagccctggtatccataaggactatacacaactccctatttattttaacctctgtttccccatgttcctttaaaggtattacggggagcaatccactggagaatcccttagagcctcctttaagttgaatattgtcaggaggactaaggtctcttgggctccctctagtggtgaaacagtttggcctagagggaggtttatcagccgacaatcccttttccagtgccctggttgtttgcaatacaggcagacatcttggggtaaagaaattcttgttctgggacctcttgatttgatttttttaatatataattttaaaaatattttccaaagtgtgacttaaaaaaatttttttttattatactttaagttttagggtacatgtgcacaacgtgcaggtttgttacatatgtatacatgtgccatgttggtgtgctgcacccattaactcatcatttacattaggtatatctcctaatgctatccctcccccctcccccaaccccacaacaggccccagtgtgtgatgttccccttcctgtgtccaagtgttctcactgttcagttcccacctacgagtgagaacatgcggtgtttggttttttgtccttgtgatagtttgctgagaatgatggtttccagcttcatccatgtccctacaaaggacattaactcatcattttttatggctccatagtattccatggtgtatatatgccacattttcttaatccagtctatcattgttggacatttgtgttggttccaagtctttgctattgtgaatagtgctgcaataaacatacgtgtgcatgtgtctttatagcagcatgatttataatcctttgggtatatacccagtaatgggatggctgggtcaaacggtatttctagttctagatccctgaggaattgccacactgacttccacaatggttgaactagtttacagtcccaccaacagtgtaaaagtgttcctatttctccacatcctctccagcacctgttgtttcctgactttttaatgattgccattctaactggtgtgagttggtatctcattgtggttttgatttgcatttctctgatggccagtgatgatgagcattttttcatgtgtcttttggctgcataaatgtcttcttttgagaagtgtctgttcatatccttcacccacttgttgatggggttgtttgtttttctcttgtaagtttgtttgagttctttgtagattctggatattagccctttgtcagatgagaagtttcagaaattttctcccattctgtaggttgcctgttcactctgatggtagtttcttttgctgtgcagaagctctttactttaatgagatcccatttgtcaattttggcttttgttgccattgcttttggtgttttagacatgaagtccttggccatgcctatgtcctgaatggtattgcctaggttttcttctaggatttttatggttttaggtctaaattaagtctttaatctatcttgaattaatttttgtataaggtgtaaggaagggatccagtttcagctttctacatatggctagccagttttcccagcaccatttattaaatagggaatcgtttccccgtttcttgtttttgtcaggtttgtcaaagatcagatagttgtagatatgcggcgttatttctgagggctctgttctgttccattggcctatatctctgttttggtaccagtaccatgctgttttggtgactgtagccttgtatagtttgaagtcaggtagcgtgatgcctccagctttgttctttggcttaggattgacttggcaatgcaggctcttttttggttccatatgaactttaaagtagttttttccaattctgtgaagaaagtctttggtagcttgatggggatggcattgaatctataaattaccctgggcagtatggccattttcacgatattgattcttcctacccatgagcatggaatgttcttccatttgtttgtatcctcttttatttccttgagcagtggtttgtagttctccttgaagaggtctttcacatcccttgtatgttggattcctaggtattttattctctttgaagcaattgtgaatgagagttcactcatgatttggctctctgtttgtctgttattggtatataagaatgctctcttttgttctttgttagtcttgctagcggtctatcaattttgttgatcttttcgaaaaaccagttactggattcattgattttttgaagggttttttgtgtctctatctccttcagttctgctctggtcttatttatttcttgccttctgctggcttttgaatgtgtttgctcttgcttctctagttcttttaattgtgacgttagggtgtcaattttagatctttcctactttctcttgtgggcatttagtgctataaatttccctctacacactgctttgaatgtgtcccagagattctggtatgttgtgtctttgttctcattggtttcaaagaacatctttacttctgccttcatttcgttatgtacccagtagtcattcaggagcaggttgttcagtttccatgtagttgagcagttttgagtgagtttcttaatcctgagttctagtttgattccactgtggtctgagagacagtttgttataatttgtattcttttacattttctgaggagagctttatttccaactatgtggtcaattttggaataagtgcagtgtggtgctaagaagaacgtatgttctgttgatttggggtggagagttctgtagatgtgtattaggtccgcttggtgcagagctgagttgaattcctggatatccttgttaactttctgtctcgttggtctgtctaatgttgacagtggggtgttaaagtctcccattattgttgtgtgggagtctgagtctctttgtaggtcactcagggcttgctttatgaatctgggtgctcctgtattggttgcatatatatttaggatagttagctcttcttgttgaattgatccctttaccattatgtaatggccttctttgtctcttttgatctttgttggtttaaagtctgttttaccagagactaggattgaaacccctgcctttttttgttttccatttgcttggtagatcttcctccatccctttattttgagcctatgtgtgactctgcacgtgagatgggtttcctgaatacagcacactgatgggtcttgactctttatccaatttgccagtccgtgtcttttaattggagcatttagcccatttacatttaaggttaatattgttatgtgtgaatttgatcctgtcattctctcaacatttgcttgtctgtaaaggattttatttctccttcacttatgaagcttagtttggctggatatgaaattctgggttgaaaattcttttctttaagaatgttgaatattggcctccactctcttctggcgtgtagagtttctgccgagagatcagctgttggtctgatgggcttccctttgtgggtaacctgacctttctctctagctgccattaacattttttccttcatttcaactttggtgaatctgacaattatgtgtcttggagttgctcttttcgaggagtatctttgtggcattctctgtgtttcctgaatttgaatgttggcctgccttgctagattggggaagttctcctggataatatcctgcagagtgttttccaacttggttccattcttcccgtcactttcaggtacaccaatcagacgtagatttggtcttttcacatagtcccatatttcttggaggctttgttcgtttctttttattcttttttctctaaacttctcttcccgcttcatttcattgatttgatcttccatcactgataccctttcttccagttgatcgaatcggctactgaggcttgtgcatccgtcacgtagttctcgtgccttggttttcagctccatcaggtcctttaaggacttctctgcattagttattctagttagccgttcgtcgaatttttttcaaggtttttaacttctttgccatgggttcgaacttcctcctttagcttggatagtttgattgtctgaagtcttcttctctcagctcgtcaaagtcattctctgtccagctttgttccgttgctggtgaggagctgcattcctttggaggaggagaggtgctctgatttttagaattttcagtatttttgctctgtttcttccccatctttgtggttttgtctacctttggtctttgatgatggtgatgtacagatgggtttttggtgtggatgtcctttctgtttgttagttttccttctaacagtcaggaccctcagctgcaggtctattggagtttgctggaggtccactccagaccatgtttgcctgggtatcagcagcggaggctgcagaacaacgaatattggtgaacagcagatgttgctgcctgatcgttcctctggaagttttgtctcagaggggtacccggccatgtgaggtgtcagtctgcccctactggggggtgcctcccagttaggctattcgggggtcagggacccacttgaggaggcagtctgtctgttctcagatctcaagctgtgtgctgggagaaccactgctctcttccaagctgtcagacagggacatttaagtctgcagaggtttctgctgccttttgttcggctatgccctgcctgcagaggtggagtctacagaggaaggcaggcctccttgagctgcagtgggctccacccagttcgagcttcccagctgctttttttacctgctcaagcctccgcaatggcgggcacccctcccccagcctcgctgccaccttgcagtttgatctcagactgctgtgctagcaatgagcgaggctccatgggcataggacccgctgagccaggcgcgggatatagtctcctggtgtgctgtttgctaagaccatcggaaaagcgcagtattagggtgggagtgacccaattttccaggtgctgtctgtcacccctttccttggctaggaaagggaattccctgaccccttgtgcttcctgggtgaggcgatgcctcgccctgctttggctcatgctcggtgcgctgcacccactgtcctgcacccactgtctgacaatccccagtgagatgaacccagtacctcagttggaaatgcagaaatcacccgttttctgcgtcgctcaagctgggagctgtagactggagctgttcctatttggccatcttggaaccgcccgattgtgatttaaaatgagaacgagatggtccctttggttcctggtccctgtaactgttgcaattgaaggggcataagcttattagccttttgaggttttttttgctctagagtcttctcaaaatgcttagctaggttgggcacgatggctcacgcctgtaatcccagcactttggaaggccaaggtgggaggatcacgaggtcaggagatcaagaccatcctggctaagatggtgaaatcccatctctactaaaaatacacagattagctgggcatggtggcacacgcctgtagtcgcagctactcgggaggctgaggcaagagaattgcttgaacctgggaggcagaggttgcagtgagccgagattgcgccactacactctagcctgggtgacagagcaagactccacctcaaaaaaaaaaaaaaaaaaaaaaaaagttcagctaaggccaccaattcagtcacatctctaacttcccattgcaacttatgttttttagttaaactgctaagttcaggatggagtccatttataagtaaagcagttaatgctgtttcagcccctgcagggaatactccttgctgtactttgagcccaggatgtttcacaaatatttctaagcgacttctgtaatctgaaactggttcatcttttcttttcttttttttttgcttacaagattgtatgatggaccaattttttgtggaaaaattttaggaactgaatgttaaaaggttttcagcgatttttctagctatttttggtccttcttgtgaggagctcttagagggccctttaaaatgtcctcctcaggtttgtcccattctgctgctgccatccatttctgagcttcaccagcccccagtatcatatgaataaattggtaaattcatgaagtcctggatcgtaagctcctattaggattctaaattcctcagtaaatttttgagacttttcccttggaccagggaagtccttcacaatggggctaagctcagttttagaccatggagtgaaagtagttacagcaggcaggcctggctgatataaggtctcactttgtaagacatctgtctaacttccttttttttttttttttttttttaaatcatcttcagggtgaaagtgtaatttaacaaaaagtttagtggactcagagtatgtaggtagagatggacaaagaaggaacagtccgagttagatcagtcaaagtacagtcctctttcttcatgtccttggtctgttgcttaagcttttcatttggtttttgcaaagaatcttttaaggaggcactttttgattcacttagtcttttggaggcctttgcgtatccatgagacaatacatcccactgtatttgtgggggctttgatcccctttttctaatatgccttgcaaacaattttatccaaattaaaacttctccattgtggccattttaattctaagttttctttagtgaggttaacccattttactgaaaatgcacatgttctgggcccataatttttatacgtaaaattagctggagtccctgaagatggagtcccagactccttggattgagatgatcccattattaaataaggtacttatcagaggtctgaggcctctaactgaatccaatccagttaattatcaaatccaatttgatcttggatccagtccaggctaagtattgcttgagtaaactcggagagctcaaaacacaagttagtggagctcggaatctgagagaaaactcacccatgacctccagttacaatcaagagaccagtgagagcaacggcctcagtgggtacctcaccaggtcacctggtgttccagggggttgccagagtttttcttcaaatcccacttctgacaccagatctgttaaaagaaaacttcagacaagttaaatttgatggagtttaattaagcaaggaaaataaacactttgcaaatcaggcagcctccagaattgaatgcagtttgaacacttagcagtctattagtgcttgaagtatggccactgggattggccaacactcagctattattacagatgcatactactcaggttttccattttgtctgcctattgtgctaggttatggtttgtccacaagaacacaaatatagaagtatggagtccttctcaggccatatttagtttgctttaacaatacttaaaaaaaaaatttgtaaaataaggatacttaaccttactcggtgtttctgagagttaacatttatatagttatgctgtagtgaaaacagctagcgtaatgtctggtatgtataggaacacaagagataccgcttttcccatatccccataccattcttcacagcattgctcctgtcttccttgattcctcctcctccttctttgttttttttttgtttgtttgtttgtttttttttggaggtggagtctcactctgttgcccaggctggagtgcagtggtgtgatctcagcttactgcaacctctgcctcctgggttcaagtgattctcctgcctcagcctcctgaatagctgggattacaggcacacaccaacacactcagctaatttttgtatttttagtagggatggggtttcaccatgttggccaggctggtcttgaactcctgacctcaggtgattcacccacctcagcctcccaaagtgctgggattacaggtgtgagccaccacaccctgcctccttcttaagaagtttccagtcccttgtaattaaaggaattaatattttttaactacttagaatcagactggccctgattattagtaagcaactaatagtaagcaagcaactatgtatgcaactatgagtgtatgttaagatatggttgttggtaacctttcattctcttcaggaagaagaagagggtggagctctacagtcaatgtgtacatttaaattctgttccctttcgagcttttttgctactttcattcttctggggatccaggtgcttgagttgggattgattaacttccttaatttccacccctgtgctgtcaggatcgggagacatagatgaaggtgttctaaactgctagaaattttgtttttgaaagcaaaagtttgcatgcatttttgttttcaacttttacttacagtgaatagtagttaataaaataagtccctgccttttctctctttggtttcaattcctgagaccaggatcatagcccacatattagagtggagtcccactgctttggtttgaatcatgcctttgtttcttatgtcagtgtgactttgggcaagttatttaagtctttgcaccacattttcctcatctgtaaaatgaggataatactagtactttctacatgggattgttagcaggattaaatgagatagcacatactgtaaccatgtctggcacatagtcaatggttagtaaatgtgaactattgtgtgacattgtggttagtcacgtatggggctgtgtttcctttagtatattgctcttttaatgtcatttcctttgtactgttaccctctctgatctttcttccatattca

SEQ ID NO: 6 - DNA, 18 bp, synthetic construct
  source 1..18: mol_type = other DNA
aggccattctgaaattct

SEQ ID NO: 7 - DNA, 18 bp, synthetic construct
  source 1..18: mol_type = other DNA
cattgaggccattctgaa

SEQ ID NO: 8 - DNA, 18 bp, synthetic construct
  source 1..18: mol_type = other DNA
taaggcattgaggccatt

SEQ ID NO: 9 - DNA, 18 bp, synthetic construct
  source 1..18: mol_type = other DNA
cctattaaggcattgagg

SEQ ID NO: 10 - DNA, 18 bp, synthetic construct
  source 1..18: mol_type = other DNA
ttcttcctattaaggcat

SEQ ID NO: 11 - DNA, 18 bp, synthetic construct
  source 1..18: mol_type = other DNA
agtatttcttcctattaa

SEQ ID NO: 12 - DNA, 18 bp, synthetic construct
  source 1..18: mol_type = other DNA
tttcaagtatttcttcct

SEQ ID NO: 13 - DNA, 18 bp, synthetic construct
  source 1..18: mol_type = other DNA
aaaaatttcaagtatttc

SEQ ID NO: 14 - DNA, 18 bp, synthetic construct
  source 1..18: mol_type = other DNA
aatttaaaaatttcaagt

SEQ ID NO: 15 - DNA, 18 bp, synthetic construct
  source 1..18: mol_type = other DNA
gccctaatttaaaaattt

SEQ ID NO: 16 - DNA, 18 bp, synthetic construct
  source 1..18: mol_type = other DNA
accaagccctaatttaaa

SEQ ID NO: 17 - DNA, 18 bp, synthetic construct
  source 1..18: mol_type = other DNA
acaaaaccaagccctaat

SEQ ID NO: 18 - DNA, 18 bp, synthetic construct
  source 1..18: mol_type = other DNA
tcctcacaaaaccaagcc

SEQ ID NO: 19 - DNA, 18 bp, synthetic construct
  source 1..18: mol_type = other DNA
ctagctcctcacaaaacc

SEQ ID NO: 20 - DNA, 18 bp, synthetic construct
  source 1..18: mol_type = other DNA
ctttactagctcctcaca

SEQ ID NO: 21 - DNA, 18 bp, synthetic construct
  source 1..18: mol_type = other DNA
aaaacctttactagctcc

SEQ ID NO: 22 - DNA, 18 bp, synthetic construct
  source 1..18: mol_type = other DNA
agagaaaaacctttacta

SEQ ID NO: 23 - DNA, 18 bp, synthetic construct
  source 1..18: mol_type = other DNA
ctgaaagagaaaaacctt

SEQ ID NO: 24 - DNA, 18 bp, synthetic construct
  source 1..18: mol_type = other DNA
aagctgaaagagaaaaac

SEQ ID NO: 25 - DNA, 18 bp, synthetic construct
  source 1..18: mol_type = other DNA
ctaaagctgaaagagaaa

SEQ ID NO: 26 - DNA, 18 bp, synthetic construct
  source 1..18: mol_type = other DNA
aagctaaagctgaaagag

SEQ ID NO: 27 - DNA, 18 bp, synthetic construct
  source 1..18: mol_type = other DNA
aacaagctaaagctgaaa

SEQ ID NO: 28 - DNA, 18 bp, synthetic construct
  source 1..18: mol_type = other DNA
agaaacaagctaaagctg

SEQ ID NO: 29 - DNA, 18 bp, synthetic construct
  source 1..18: mol_type = other DNA
cgcagaaacaagctaaag

SEQ ID NO: 30 - DNA, 18 bp, synthetic construct
  source 1..18: mol_type = other DNA
tcctccgcagaaacaagc

SEQ ID NO: 31 - DNA, 18 bp, synthetic construct
  source 1..18: mol_type = other DNA
cggaatcctccgcagaaa

SEQ ID NO: 32 - DNA, 18 bp, synthetic construct
  source 1..18: mol_type = other DNA
aagagcggaatcctccgc

SEQ ID NO: 33 - DNA, 18 bp, synthetic construct
  source 1..18: mol_type = other DNA
ggagaaagagcggaatcc

SEQ ID NO: 34 - DNA, 18 bp, synthetic construct
  source 1..18: mol_type = other DNA
ctgatggagaaagagcgg

SEQ ID NO: 35 - DNA, 18 bp, synthetic construct
  source 1..18: mol_type = other DNA
tgaaactgatggagaaag

SEQ ID NO: 36 - DNA, 18 bp, synthetic construct
  source 1..18: mol_type = other DNA
ggctatgaaactgatgga

SEQ ID NO: 37 - DNA, 18 bp, synthetic construct
  source 1..18: mol_type = other DNA
tccagggctatgaaactg

SEQ ID NO: 38 - DNA, 18 bp, synthetic construct
  source 1..18: mol_type = other DNA
acaattccagggctatga

SEQ ID NO: 39 - DNA, 18 bp, synthetic construct
  source 1..18: mol_type = other DNA
tttctacaattccagggc

SEQ ID NO: 40 - DNA, 18 bp, synthetic construct
  source 1..18: mol_type = other DNA
gagcttttctacaattcc

SEQ ID NO: 41 - DNA, 18 bp, synthetic construct
  source 1..18: mol_type = other DNA
aaccagagcttttctaca

SEQ ID NO: 42 - DNA, 18 bp, synthetic construct
  source 1..18: mol_type = other DNA
cttgaaaccagagctttt

SEQ ID NO: 43 - DNA, 18 bp, synthetic construct
  source 1..18: mol_type = other DNA
atggtcttgaaaccagag

SEQ ID NO: 44 - DNA, 18 bp, synthetic construct
  source 1..18: mol_type = other DNA
tatcaatggtcttgaaac

SEQ ID NO: 45 - DNA, 18 bp, synthetic construct
  source 1..18: mol_type = other DNA
atggatatcaatggtctt

SEQ ID NO: 46 - DNA, 18 bp, synthetic construct
  source 1..18: mol_type = other DNA
cagaaatggatatcaatg

SEQ ID NO: 47 - DNA, 18 bp, synthetic construct
  source 1..18: mol_type = other DNA
cctgacagaaatggatat

SEQ ID NO: 48 - DNA, 18 bp, synthetic construct
  source 1..18: mol_type = other DNA
caccctgacagaaatgga

SEQ ID NO: 49 - DNA, 18 bp, synthetic construct
  source 1..18: mol_type = other DNA
actcaccctgacagaaat

SEQ ID NO: 50 - DNA, 18 bp, synthetic construct
  source 1..18: mol_type = other DNA
aaaactcaccctgacaga

SEQ ID NO: 51 - DNA, 18 bp, synthetic construct
  source 1..18: mol_type = other DNA
tttaaaactcaccctgac

SEQ ID NO: 52 - DNA, 18 bp, synthetic construct
  source 1..18: mol_type = other DNA
aaatttaaaactcaccct

SEQ ID NO: 53 - DNA, 18 bp, synthetic construct
  source 1..18: mol_type = other DNA
aataaatttaaaactcac

SEQ ID NO: 54 - DNA, 18 bp, synthetic construct
  source 1..18: mol_type = other DNA
catgaaataaatttaaaa

SEQ ID NO: 55 - DNA, 18 bp, synthetic construct
  source 1..18: mol_type = other DNA
tgcatcatgaaataaatt

SEQ ID NO: 56 - DNA, 18 bp, synthetic construct
  source 1..18: mol_type = other DNA
ttgtttgcatcatgaaat

SEQ ID NO: 57 - DNA, 18 bp, synthetic construct
  source 1..18: mol_type = other DNA
atatattgtttgcatcat

SEQ ID NO: 58 - DNA, 18 bp, synthetic construct
  source 1..18: mol_type = other DNA
gttcaatatattgtttgc

SEQ ID NO: 59 - DNA, 18 bp, synthetic construct
  source 1..18: mol_type = other DNA
ctgttgttcaatatattg

SEQ ID NO: 60 - DNA, 18 bp, synthetic construct
  source 1..18: mol_type = other DNA
atgtcctgttgttcaata

SEQ ID NO: 61 - DNA, 18 bp, synthetic construct
  source 1..18: mol_type = other DNA
agttcatgtcctgttgtt

SEQ ID NO: 62 - DNA, 18 bp, synthetic construct
  source 1..18: mol_type = other DNA
gaacaagttcatgtcctg

SEQ ID NO: 63 - DNA, 18 bp, synthetic construct
  source 1..18: mol_type = other DNA
aacaagaacaagttcatg

SEQ ID NO: 64 - DNA, 18 bp, synthetic construct
  source 1..18: mol_type = other DNA
cttacaacaagaacaagt

SEQ ID NO: 65 - DNA, 18 bp, synthetic construct
  source 1..18: mol_type = other DNA
agccacttacaacaagaa

SEQ ID NO: 66 - DNA, 18 bp, synthetic construct
  source 1..18: mol_type = other DNA
aattcagccacttacaac

SEQ ID NO: 67 - DNA, 18 bp, synthetic construct
  source 1..18: mol_type = other DNA
gataaaattcagccactt

SEQ ID NO: 68 - DNA, 18 bp, synthetic construct
  source 1..18: mol_type = other DNA
ttactgataaaattcagc

SEQ ID NO: 69 - DNA, 18 bp, synthetic construct
  source 1..18: mol_type = other DNA
gtgctttactgataaaat

SEQ ID NO: 70 - DNA, 18 bp, synthetic construct
  source 1..18: mol_type = other DNA
ttgatgtgctttactgat

SEQ ID NO: 71 - DNA, 18 bp, synthetic construct
  source 1..18: mol_type = other DNA
tggagaaagagcggaatc

SEQ ID NO: 72 - DNA, 18 bp, synthetic construct
  source 1..18: mol_type = other DNA
atggagaaagagcggaat

SEQ ID NO: 73 - DNA, 18 bp, synthetic construct
  source 1..18: mol_type = other DNA
gatggagaaagagcggaa

SEQ ID NO: 74 - DNA, 18 bp, synthetic construct
  source 1..18: mol_type = other DNA
tgatggagaaagagcgga

SEQ ID NO: 75 - DNA, 18 bp, synthetic construct
  source 1..18: mol_type = other DNA
actgatggagaaagagcg

SEQ ID NO: 76 - DNA, 18 bp, synthetic construct
  source 1..18: mol_type = other DNA
aactgatggagaaagagc

SEQ ID NO: 77 - DNA, 18 bp, synthetic construct
  source 1..18: mol_type = other DNA
aaactgatggagaaagag

SEQ ID NO: 78 - DNA, 18 bp, synthetic construct
  source 1..18: mol_type = other DNA
gaaactgatggagaaaga

SEQ ID NO: 79 - DNA, 18 bp, synthetic construct
  source 1..18: mol_type = other DNA
atgaaactgatggagaaa

SEQ ID NO: 80 - DNA, 18 bp, synthetic construct
  source 1..18: mol_type = other DNA
tatgaaactgatggagaa

SEQ ID NO: 81 - DNA, 18 bp, synthetic construct
  source 1..18: mol_type = other DNA
ctatgaaactgatggaga

SEQ ID NO: 82 - DNA, 18 bp, synthetic construct
  source 1..18: mol_type = other DNA
gctatgaaactgatggag

SEQ ID NO: 83 - DNA, 18 bp, synthetic construct
  source 1..18: mol_type = other DNA
gggctatgaaactgatgg

SEQ ID NO: 84 - DNA, 18 bp, synthetic construct
  source 1..18: mol_type = other DNA
agggctatgaaactgatg

SEQ ID NO: 85 - DNA, 18 bp, synthetic construct
  source 1..18: mol_type = other DNA
cagggctatgaaactgat

SEQ ID NO: 86 - DNA, 18 bp, synthetic construct
  source 1..18: mol_type = other DNA
ccagggctatgaaactga

SEQ ID NO: 87 - DNA, 22 bp, synthetic construct
  source 1..22: mol_type = other DNA
ctgatggagaaagagcggaatc

SEQ ID NO: 88 - DNA, 20 bp, synthetic construct
  source 1..20: mol_type = other DNA
ctgatggagaaagagcggaa

SEQ ID NO: 89 - DNA, 22 bp, synthetic construct
  source 1..22: mol_type = other DNA
aactgatggagaaagagcggaa

SEQ ID NO: 90 - DNA, 20 bp, synthetic construct
  source 1..20: mol_type = other DNA
aactgatggagaaagagcgg

SEQ ID NO: 91 - DNA, 22 bp, synthetic construct
  source 1..22: mol_type = other DNA
gaaactgatggagaaagagcgg

SEQ ID NO: 92 - DNA, 22 bp, synthetic construct
  source 1..22: mol_type = other DNA
ggctatgaaactgatggagaaa

SEQ ID NO: 93 - DNA, 20 bp, synthetic construct
  source 1..20: mol_type = other DNA
ggctatgaaactgatggaga

SEQ ID NO: 94 - DNA, 22 bp, synthetic construct
  source 1..22: mol_type = other DNA
agggctatgaaactgatggaga

SEQ ID NO: 95 - DNA, 20 bp, synthetic construct
  source 1..20: mol_type = other DNA
agggctatgaaactgatgga

SEQ ID NO: 96 - DNA, 22 bp, synthetic construct
  source 1..22: mol_type = other DNA
ccagggctatgaaactgatgga

SEQ ID NO: 97 - DNA, 18 bp, synthetic construct
  source 1..18: mol_type = other DNA
ttcttacccatttaatta

SEQ ID NO: 98 - DNA, 18 bp, synthetic construct
  source 1..18: mol_type = other DNA
tgcttcttacccatttaa

SEQ ID NO: 99 - DNA, 18 bp, synthetic construct
  source 1..18: mol_type = other DNA
taatgcttcttacccatt

SEQ ID NO: 100 - DNA, 18 bp, synthetic construct
  source 1..18: mol_type = other DNA
agataatgcttcttaccc

SEQ ID NO: 101 - DNA, 18 bp, synthetic construct
  source 1..18: mol_type = other DNA
cagataatgcttcttacc

SEQ ID NO: 102 - DNA, 18 bp, synthetic construct
  source 1..18: mol_type = other DNA
cccttcagataatgcttc

SEQ ID NO: 103 - DNA, 18 bp, synthetic construct
  source 1..18: mol_type = other DNA
ctactcccttcagataat

SEQ ID NO: 104 - DNA, 18 bp, synthetic construct
  source 1..18: mol_type = other DNA
agctcctactcccttcag

SEQ ID NO: 105 - DNA, 18 bp, synthetic construct
  source 1..18: mol_type = other DNA
ttcacagctcctactccc

SEQ ID NO: 106 - DNA, 18 bp, synthetic construct
  source 1..18: mol_type = other DNA
taaaattcacagctccta

SEQ ID NO: 107 - DNA, 18 bp, synthetic construct
  source 1..18: mol_type = other DNA
aaatctaaaattcacagc

SEQ ID NO: 108 - DNA, 18 bp, synthetic construct
  source 1..18: mol_type = other DNA
gaataaaatctaaaattc

SEQ ID NO: 109 - DNA, 18 bp, synthetic construct
  source 1..18: mol_type = other DNA
gatgggaataaaatctaa

SEQ ID NO: 110 - DNA, 18 bp, synthetic construct
  source 1..18: mol_type = other DNA
gctgtgatgggaataaaa

SEQ ID NO: 111 - DNA, 18 bp, synthetic construct
  source 1..18: mol_type = other DNA
tagaggctgtgatgggaa

SEQ ID NO: 112 - DNA, 18 bp, synthetic construct
  source 1..18: mol_type = other DNA
aaagatagaggctgtgat

SEQ ID NO: 113 - DNA, 18 bp, synthetic construct
  source 1..18: mol_type = other DNA
aaaagaaagatagaggct

SEQ ID NO: 114 - DNA, 18 bp, synthetic construct
  source 1..18: mol_type = other DNA
gacctaaaagaaagatag

SEQ ID NO: 115 - DNA, 18 bp, synthetic construct
  source 1..18: mol_type = other DNA
ataaagacctaaaagaaa

SEQ ID NO: 116 - DNA, 18 bp, synthetic construct
  source 1..18: mol_type = other DNA
gagatataaagacctaaa

SEQ ID NO: 117 - DNA, 18 bp, synthetic construct
  source 1..18: mol_type = other DNA
ggctgtgatgggaataaa

SEQ ID NO: 118 - DNA, 18 bp, synthetic construct
  source 1..18: mol_type = other DNA
aggctgtgatgggaataa

SEQ ID NO: 119 - DNA, 18 bp, synthetic construct
  source 1..18: mol_type = other DNA
gaggctgtgatgggaata

SEQ ID NO: 120 - DNA, 18 bp, synthetic construct
  source 1..18: mol_type = other DNA
agaggctgtgatgggaat

SEQ ID NO: 121 - DNA, 18 bp, synthetic construct
  source 1..18: mol_type = other DNA
atagaggctgtgatggga

SEQ ID NO: 122 - DNA, 18 bp, synthetic construct
  source 1..18: mol_type = other DNA
gatagaggctgtgatggg

SEQ ID NO: 123 - DNA, 18 bp, synthetic construct
  source 1..18: mol_type = other DNA
agatagaggctgtgatgg

SEQ ID NO: 124 - DNA, 18 bp, synthetic construct
  source 1..18: mol_type = other DNA
aagatagaggctgtgatg

SEQ ID NO: 125 - DNA, 22 bp, synthetic construct
  source 1..22: mol_type = other DNA
tagaggctgtgatgggaataaa

SEQ ID NO: 126 - DNA, 22 bp, synthetic construct
  source 1..22: mol_type = other DNA
atagaggctgtgatgggaataa

SEQ ID NO: 127 - DNA, 22 bp, synthetic construct
  source 1..22: mol_type = other DNA
gatagaggctgtgatgggaata

SEQ ID NO: 128 - DNA, 22 bp, synthetic construct
  source 1..22: mol_type = other DNA
agatagaggctgtgatgggaat

SEQ ID NO: 129 - DNA, 22 bp, synthetic construct
  source 1..22: mol_type = other DNA
aagatagaggctgtgatgggaa

SEQ ID NO: 130 - DNA, 20 bp, synthetic construct
  source 1..20: mol_type = other DNA
gaggctgtgatgggaataaa

SEQ ID NO: 131 - DNA, 20 bp, synthetic construct
  source 1..20: mol_type = other DNA
agaggctgtgatgggaataa

SEQ ID NO: 132 - DNA, 20 bp, synthetic construct
  source 1..20: mol_type = other DNA
tagaggctgtgatgggaata

SEQ ID NO: 133 - DNA, 20 bp, synthetic construct
  source 1..20: mol_type = other DNA
atagaggctgtgatgggaat

SEQ ID NO: 134 - DNA, 20 bp, synthetic construct
  source 1..20: mol_type = other DNA
gatagaggctgtgatgggaa

SEQ ID NO: 135 - DNA, 20 bp, synthetic construct
  source 1..20: mol_type = other DNA
agatagaggctgtgatggga

SEQ ID NO: 136 - DNA, 20 bp, synthetic construct
  source 1..20: mol_type = other DNA
aagatagaggctgtgatggg

SEQ ID NO: 137 - DNA, 16 bp, synthetic construct
  source 1..16: mol_type = other DNA
ctgtgatgggaataaa

SEQ ID NO: 138 - DNA, 16 bp, synthetic construct
  source 1..16: mol_type = other DNA
gctgtgatgggaataa

SEQ ID NO: 139 - DNA, 16 bp, synthetic construct
  source 1..16: mol_type = other DNA
ggctgtgatgggaata

SEQ ID NO: 140 - DNA, 16 bp, synthetic construct
  source 1..16: mol_type = other DNA
aggctgtgatgggaat

SEQ ID NO: 141 - DNA, 16 bp, synthetic construct
  source 1..16: mol_type = other DNA
gaggctgtgatgggaa

SEQ ID NO: 142 - DNA, 16 bp, synthetic construct
  source 1..16: mol_type = other DNA
agaggctgtgatggga

SEQ ID NO: 143 - DNA, 16 bp, synthetic construct
  source 1..16: mol_type = other DNA
tagaggctgtgatggg

SEQ ID NO: 144 - DNA, 16 bp, synthetic construct
  source 1..16: mol_type = other DNA
atagaggctgtgatgg

SEQ ID NO: 145 - DNA, 16 bp, synthetic construct
  source 1..16: mol_type = other DNA
gatagaggctgtgatg

SEQ ID NO: 146 - DNA, 16 bp, synthetic construct
  source 1..16: mol_type = other DNA
agatagaggctgtgat

SEQ ID NO: 147 - DNA, 16 bp, synthetic construct
  source 1..16: mol_type = other DNA
aagatagaggctgtga

SEQ ID NO: 148 - DNA, 18 bp, synthetic construct
  source 1..18: mol_type = other DNA
aggctgtgatgtgaataa

SEQ ID NO: 149 - DNA, 18 bp, synthetic construct
  source 1..18: mol_type = other DNA
agaggctgtgatgtgaat

SEQ ID NO: 150 - DNA, 18 bp, synthetic construct
  source 1..18: mol_type = other DNA
tagaggctgtgatgtgaa

SEQ ID NO: 151 - DNA, 18 bp, synthetic construct
  source 1..18: mol_type = other DNA
gatagaggctgtgattgg

SEQ ID NO: 152 - DNA, 16 bp, synthetic construct
  source 1..16: mol_type = other DNA
ggctgtgatgtgaata

SEQ ID NO: 153 - DNA, 16 bp, synthetic construct
  source 1..16: mol_type = other DNA
gaggctgtgatgtgaa

SEQ ID NO: 154 - DNA, 16 bp, synthetic construct
  source 1..16: mol_type = other DNA
tagaggctgtgattgg

SEQ ID NO: 155 - DNA, 16 bp, synthetic construct
  source 1..16: mol_type = other DNA
atgaaactgatggaga

SEQ ID NO: 156 - DNA, 16 bp, synthetic construct
  source 1..16: mol_type = other DNA
ctatgaaactgatgga

SEQ ID NO: 157 - DNA, 16 bp, synthetic construct
  source 1..16: mol_type = other DNA
ggctatgaaactgatg

SEQ ID NO: 158 - DNA, 14 bp, synthetic construct
  source 1..14: mol_type = other DNA
gaaactgatggaga

SEQ ID NO: 159 - DNA, 14 bp, synthetic construct
  source 1..14: mol_type = other DNA
atgaaactgatgga

SEQ ID NO: 160 - DNA, 14 bp, synthetic construct
  source 1..14: mol_type = other DNA
ctatgaaactgatg

SEQ ID NO: 161 - DNA, 14 bp, synthetic construct
  source 1..14: mol_type = other DNA
ggctatgaaactga

SEQ ID NO: 162 - DNA, 24 bp, synthetic construct
  source 1..24: mol_type = other DNA
tagaggctgtgatgggaataaaat

SEQ ID NO: 163 - DNA, 24 bp, synthetic construct
  source 1..24: mol_type = other DNA
atagaggctgtgatgggaataaaa

SEQ ID NO: 164 - DNA, 25 bp, synthetic construct
  source 1..25: mol_type = other DNA
atagaggctgtgatgggaataaaat

SEQ ID NO: 165 - DNA, 25 bp, synthetic construct
  source 1..25: mol_type = other DNA
aaagatagaggctgtgatgggaata

SEQ ID NO: 166 - DNA, 21 bp, synthetic construct
  source 1..21: mol_type = other DNA
ggctatgaaactgatggagaa

SEQ ID NO: 167 - DNA, 24 bp, synthetic construct
  source 1..24: mol_type = other DNA
ggctatgaaactgatggagaaaga

SEQ ID NO: 168 - DNA, 25 bp, synthetic construct
  source 1..25: mol_type = other DNA
agggctatgaaactgatggagaaag

SEQ ID NO: 169 - DNA, 18 bp, synthetic construct
  source 1..18: mol_type = other DNA
catttaattaaattatat

SEQ ID NO: 170 - DNA, 18 bp, synthetic construct
  source 1..18: mol_type = other DNA
ccatttaattaaattata

SEQ ID NO: 171 - DNA, 18 bp, synthetic construct
  source 1..18: mol_type = other DNA
cccatttaattaaattat

SEQ ID NO: 172 - DNA, 18 bp, synthetic construct
  source 1..18: mol_type = other DNA
acccatttaattaaatta

SEQ ID NO: 173 - DNA, 18 bp, synthetic construct
  source 1..18: mol_type = other DNA
tacccatttaattaaatt

SEQ ID NO: 174 - DNA, 18 bp, synthetic construct
  source 1..18: mol_type = other DNA
ttacccatttaattaaat

SEQ ID NO: 175 - DNA, 18 bp, synthetic construct
  source 1..18: mol_type = other DNA
cttacccatttaattaaa

SEQ ID NO: 176 - DNA, 18 bp, synthetic construct
  source 1..18: mol_type = other DNA
tcttacccatttaattaa

SEQ ID NO: 177 - DNA, 17 bp, synthetic construct
  source 1..17: mol_type = other DNA
gatagaggctgtgatgg

SEQ ID NO: 178 - DNA, 18 bp, synthetic construct
  source 1..18: mol_type = other DNA
ggctgtgaaactgatgga

SEQ ID NO: 179 - DNA, 20 bp, synthetic construct
  source 1..20: mol_type = other DNA
ggctgtgaaactgatggaga

SEQ ID NO: 180 - DNA, 16 bp, synthetic construct
  source 1..16: mol_type = other DNA
gctatgaaactgatgg

SEQ ID NO: 181 - DNA, 14 bp, synthetic construct
  source 1..14: mol_type = other DNA
tatgaaactgatgg

SEQ ID NO: 182 - DNA, 14 bp, synthetic construct
  source 1..14: mol_type = other DNA
gctatgaaactgat

SEQ ID NO: 183 - DNA, 20 bp, synthetic construct
  source 1..20: mol_type = other DNA
gctgtgaaactgatggagaa

SEQ ID NO: 184 - DNA, 20 bp, synthetic construct
  source 1..20: mol_type = other DNA
gggctgtgaaactgatggag

SEQ ID NO: 185 - DNA, 18 bp, synthetic construct
  source 1..18: mol_type = other DNA
tgtgaaactgatggagaa

SEQ ID NO: 186 - DNA, 18 bp, synthetic construct
  source 1..18: mol_type = other DNA
ctgtgaaactgatggaga

SEQ ID NO: 187 - DNA, 18 bp, synthetic construct
  source 1..18: mol_type = other DNA
gctgtgaaactgatggag

SEQ ID NO: 188 - DNA, 18 bp, synthetic construct
  source 1..18: mol_type = other DNA
gggctgtgaaactgatgg

SEQ ID NO: 189 - DNA, 16 bp, synthetic construct
  source 1..16: mol_type = other DNA
tgaaactgatggagaa

SEQ ID NO: 190 - DNA, 16 bp, synthetic construct
  source 1..16: mol_type = other DNA
gtgaaactgatggaga

SEQ ID NO: 191 - DNA, 16 bp, synthetic construct
  source 1..16: mol_type = other DNA
tgtgaaactgatggag

SEQ ID NO: 192 - DNA, 16 bp, synthetic construct
  source 1..16: mol_type = other DNA
ctgtgaaactgatgga

SEQ ID NO: 193 - DNA, 16 bp, synthetic construct
  source 1..16: mol_type = other DNA
gctgtgaaactgatgg

SEQ ID NO: 194 - DNA, 16 bp, synthetic construct
  source 1..16: mol_type = other DNA
ggctgtgaaactgatg

SEQ ID NO: 195 - DNA, 16 bp, synthetic construct
  source 1..16: mol_type = other DNA
gggctgtgaaactgat

SEQ ID NO: 196 - DNA, 15 bp, synthetic construct
  source 1..15: mol_type = other DNA
cggtccaggaatgac

SEQ ID NO: 197 - DNA, 15 bp, synthetic construct
  source 1..15: mol_type = other DNA
ccggtccaggaatga

SEQ ID NO: 198 - DNA, 15 bp, synthetic construct
  source 1..15: mol_type = other DNA
cccggtccaggaatg

SEQ ID NO: 199 - DNA, 15 bp, synthetic construct
  source 1..15: mol_type = other DNA
tcccggtccaggaat

SEQ ID NO: 200 - DNA, 15 bp, synthetic construct
  source 1..15: mol_type = other DNA
ctcccggtccaggaa

SEQ ID NO: 201 - DNA, 15 bp, synthetic construct
  source 1..15: mol_type = other DNA
gctcccggtccagga

SEQ ID NO: 202 - DNA, 15 bp, synthetic construct
  source 1..15: mol_type = other DNA
ggctcccggtccagg

SEQ ID NO: 203 - DNA, 15 bp, synthetic construct
  source 1..15: mol_type = other DNA
cgggagcccccgtgt

SEQ ID NO: 204 - DNA, 15 bp, synthetic construct
  source 1..15: mol_type = other DNA
gcgggagcccccgtg

SEQ ID NO: 205 - DNA, 15 bp, synthetic construct
  source 1..15: mol_type = other DNA
cgcgggagcccccgt

SEQ ID NO: 206 - DNA, 15 bp, synthetic construct
  source 1..15: mol_type = other DNA
acgcgggagcccccg

SEQ ID NO: 207 - DNA, 15 bp, synthetic construct
  source 1..15: mol_type = other DNA
cacgcgggagccccc

SEQ ID NO: 208 - DNA, 15 bp, synthetic construct
  source 1..15: mol_type = other DNA
ccacgcgggagcccc

SEQ ID NO: 209 - DNA, 15 bp, synthetic construct
  source 1..15: mol_type = other DNA
gccacgcgggagccc

SEQ ID NO: 210 - DNA, 15 bp, synthetic construct
  source 1..15: mol_type = other DNA
ggccacgcgggagcc

SEQ ID NO: 211 - DNA, 15 bp, synthetic construct
  source 1..15: mol_type = other DNA
cggccacgcgggagc

SEQ ID NO: 212 - DNA, 15 bp, synthetic construct
  source 1..15: mol_type = other DNA
acggccacgcgggag

SEQ ID NO: 213 - DNA, 15 bp, synthetic construct
  source 1..15: mol_type = other DNA
gacggccacgcggga

SEQ ID NO: 214 - DNA, 15 bp, synthetic construct
  source 1..15: mol_type = other DNA
agacggccacgcggg

SEQ ID NO: 215 - DNA, 18 bp, synthetic construct
  source 1..18: mol_type = other DNA
gctagggagggatggtta

SEQ ID NO: 216 - DNA, 18 bp, synthetic construct
  source 1..18: mol_type = other DNA
tgtaagctagggagggat

SEQ ID NO: 217 - DNA, 18 bp, synthetic construct
  source 1..18: mol_type = other DNA
acagatgtaagctaggga

SEQ ID NO: 218 - DNA, 18 bp, synthetic construct
  source 1..18: mol_type = other DNA
aaggaacagatgtaagct

SEQ ID NO: 219 - DNA, 18 bp, synthetic construct
  source 1..18: mol_type = other DNA
caacaaaggaacagatgt

SEQ ID NO: 220 - DNA, 18 bp, synthetic construct
  source 1..18: mol_type = other DNA
gggtgcaacaaaggaaca

SEQ ID NO: 221 - DNA, 18 bp, synthetic construct
  source 1..18: mol_type = other DNA
accaagggtgcaacaaag

SEQ ID NO: 222 - DNA, 18 bp, synthetic construct
  source 1..18: mol_type = other DNA
gttaaaccaagggtgcaa

SEQ ID NO: 223 - DNA, 18 bp, synthetic construct
  source 1..18: mol_type = other DNA
ataatgttaaaccaaggg

SEQ ID NO: 224 - DNA, 18 bp, synthetic construct
  source 1..18: mol_type = other DNA
ggagaataatgttaaacc

SEQ ID NO: 225 - DNA, 18 bp, synthetic construct
  source 1..18: mol_type = other DNA
ggggaggagaataatgtt

SEQ ID NO: 226 - DNA, 18 bp, synthetic construct
  source 1..18: mol_type = other DNA
aaattggggaggagaata

SEQ ID NO: 227 - DNA, 18 bp, synthetic construct
  source 1..18: mol_type = other DNA
agaggaaattggggagga

SEQ ID NO: 228 - DNA, 18 bp, synthetic construct
  source 1..18: mol_type = other DNA
ggagaagaggaaattggg

SEQ ID NO: 229 - DNA, 18 bp, synthetic construct
  source 1..18: mol_type = other DNA
aatgaggagaagaggaaa

SEQ ID NO: 230 - DNA, 18 bp, synthetic construct
  source 1..18: mol_type = other DNA
ttcacaatgaggagaaga

SEQ ID NO: 231 - DNA, 18 bp, synthetic construct
  source 1..18: mol_type = other DNA
acgagttcacaatgagga

SEQ ID NO: 232 - DNA, 18 bp, synthetic construct
  source 1..18: mol_type = other DNA
ctgccacgagttcacaat

SEQ ID NO: 233 - DNA, 18 bp, synthetic construct
  source 1..18: mol_type = other DNA
agaccctgccacgagttc

SEQ ID NO: 234 - DNA, 18 bp, synthetic construct
  source 1..18: mol_type = other DNA
caagcagaccctgccacg

SEQ ID NO: 235 - DNA, 18 bp, synthetic construct
  source 1..18: mol_type = other DNA
ctcaccaagcagaccctg

SEQ ID NO: 236 - DNA, 18 bp, synthetic construct
  source 1..18: mol_type = other DNA
gagctcaccaagcagacc

SEQ ID NO: 237 - DNA, 18 bp, synthetic construct
  source 1..18: mol_type = other DNA
agaatgagctcaccaagc

SEQ ID NO: 238 - DNA, 18 bp, synthetic construct
  source 1..18: mol_type = other DNA
gtaagagaatgagctcac

SEQ ID NO: 239 - DNA, 18 bp, synthetic construct
  source 1..18: mol_type = other DNA
ttgttgtaagagaatgag

SEQ ID NO: 240 - DNA, 18 bp, synthetic construct
  source 1..18: mol_type = other DNA
atttgttgttgtaagaga

SEQ ID NO: 241 - DNA, 18 bp, synthetic construct
  source 1..18: mol_type = other DNA
cttgaatttgttgttgta

SEQ ID NO: 242 - DNA, 18 bp, synthetic construct
  source 1..18: mol_type = other DNA
atgctcttgaatttgttg

SEQ ID NO: 243 - DNA, 18 bp, synthetic construct
  source 1..18: mol_type = other DNA
tcttcatgctcttgaatt

SEQ ID NO: 244 - DNA, 18 bp, synthetic construct
  source 1..18: mol_type = other DNA
cttcctcttcatgctctt

SEQ ID NO: 245 - DNA, 18 bp, synthetic construct
  source 1..18: mol_type = other DNA
gcgcgcttcctcttcatg

SEQ ID NO: 246 - DNA, 18 bp, synthetic construct
  source 1..18: mol_type = other DNA
gctctgcgcgcttcctct

SEQ ID NO: 247 - DNA, 18 bp, synthetic construct
  source 1..18: mol_type = other DNA
ggccagcggctctgcgcg

SEQ ID NO: 248 - DNA, 18 bp, synthetic construct
  source 1..18: mol_type = other DNA
atattggccagcggctct

SEQ ID NO: 249 - DNA, 18 bp, synthetic construct
  source 1..18: mol_type = other DNA
gtgctatattggccagcg

SEQ ID NO: 250 - DNA, 18 bp, synthetic construct
  source 1..18: mol_type = other DNA
agctcgtgctatattggc

SEQ ID NO: 251 - DNA, 18 bp, synthetic construct
  source 1..18: mol_type = other DNA
ggcatagctcgtgctata

SEQ ID NO: 252 - DNA, 18 bp, synthetic construct
  source 1..18: mol_type = other DNA
tgttgggcatagctcgtg

SEQ ID NO: 253 - DNA, 18 bp, synthetic construct
  source 1..18: mol_type = other DNA
gcttctgttgggcatagc

SEQ ID NO: 254 - DNA, 18 bp, synthetic construct
  source 1..18: mol_type = other DNA
cttgcgcttctgttgggc

SEQ ID NO: 255 - DNA, 18 bp, synthetic construct
  source 1..18: mol_type = other DNA
caccttgcgcttctgttg

SEQ ID NO: 256 - DNA, 18 bp, synthetic construct
  source 1..18: mol_type = other DNA
tccatcaccttgcgcttc

SEQ ID NO: 257 - DNA, 18 bp, synthetic construct
  source 1..18: mol_type = other DNA
aaccatccatcaccttgc

SEQ ID NO: 258 - DNA, 18 bp, synthetic construct
  source 1..18: mol_type = other DNA
ccttaaaccatccatcac

SEQ ID NO: 259 - DNA, 18 bp, synthetic construct
  source 1..18: mol_type = other DNA
agcccccttaaaccatcc

SEQ ID NO: 260 - DNA, 18 bp, synthetic construct
  source 1..18: mol_type = other DNA
tcggtagcccccttaaac

SEQ ID NO: 261 - DNA, 18 bp, synthetic construct
  source 1..18: mol_type = other DNA
atgtatcggtagccccct

SEQ ID NO: 262 - DNA, 18 bp, synthetic construct
  source 1..18: mol_type = other DNA
tgtgaatgtatcggtagc

SEQ ID NO: 263 - DNA, 18 bp, synthetic construct
  source 1..18: mol_type = other DNA
attagtgtgaatgtatcg

SEQ ID NO: 264 - DNA, 18 bp, synthetic construct
  source 1..18: mol_type = other DNA
ggctgattagtgtgaatg

SEQ ID NO: 265 - DNA, 18 bp, synthetic construct
  source 1..18: mol_type = other DNA
gaaatggctgattagtgt

SEQ ID NO: 266 - DNA, 18 bp, synthetic construct
  source 1..18: mol_type = other DNA
tggcagaaatggctgatt

SEQ ID NO: 267 - DNA, 18 bp, synthetic construct
  source 1..18: mol_type = other DNA
gatcttggcagaaatggc

SEQ ID NO: 268 - DNA, 18 bp, synthetic construct
  source 1..18: mol_type = other DNA
gacatgatcttggcagaa

SEQ ID NO: 269 - DNA, 18 bp, synthetic construct
  source 1..18: mol_type = other DNA
gaggtgacatgatcttgg

SEQ ID NO: 270 - DNA, 18 bp, synthetic construct
  source 1..18: mol_type = other DNA
agattgaggtgacatgat

SEQ ID NO: 271 - DNA, 18 bp, synthetic construct
  source 1..18: mol_type = other DNA
tgaacagattgaggtgac

SEQ ID NO: 272 - DNA, 18 bp, synthetic construct
  source 1..18: mol_type = other DNA
gtccatgaacagattgag

SEQ ID NO: 273 - DNA, 18 bp, synthetic construct
  source 1..18: mol_type = other DNA
ttggagtccatgaacaga

SEQ ID NO: 274 - DNA, 18 bp, synthetic construct
  source 1..18: mol_type = other DNA
tgtatttggagtccatga

SEQ ID NO: 275 - DNA, 18 bp, synthetic construct
  source 1..18: mol_type = other DNA
tttcttgtatttggagtc

SEQ ID NO: 276 - DNA, 7155 bp, Homo sapiens
  source 1..7155: mol_type = genomic DNA
gtaagtgtaaaagagaattgttcatgtaggtagtcttgaaagattttttaaagtttttacttctttggaagattttaaaatgataacatctgagaagcaaatacaaaaacatccaagtagagatatcgttactaatcttagtgcaaagtacaaggtattacgtggcagttctggaaatataattgagaagcccatttctttcacatatgtccagtgaagcattagtttcgagggttgtccccaagaaagagttgtgttgttaagtgtgtggggggagaaaggctcgtttagacaaggcaagcggacttcttttctttccctaggacctctcatactgtaatatactcatgcgcattgtgaatttccaaggagtcaaagcatacagtgttttcccaaattatttatcaacagaacccttttgctcatggaacgtcgtatagggactagatttcactttggggaaactagaaagggaataggaattgggttattaggaaataaatcaattccctgatattgatagttaacaaagttatgtatggggttatttatggtatgttattttcaacacatattcattaacaaaatccatatgaaagttataggagaattgctgaggtagaataacatactttgtttgtatttataatactcatatatttacctgacgttttctgagtcttcacttttttcattcttttggaattggtaaaataactgattccttgaaagtttttttctaaataatacctagataatagatttatagaaaaaatattgtatgaatgttttaacattcatgtaatatggaacatgtaatttttatactggaggttattatagttttaatacatcaaagaaataatgtttattttggaagcagaaagaagaaataatttctatgaataggttttcatctctttccttgttcttcaactttgaactttttatattccaaattttaattatatttcaaaagatttttttcttttgccttttaattttatcttttggagaaaaatgtatgtcaaaatgtatgtacgtgtatttgtcttttgatttgatcttttttgaccctcttttgcattgacattattttaaccaaaggacactcttgattgttcatgctactgggggaaaaaaaaataagtagaaattagcctaatagttgtggcttattttgagtgaaggccttagcccttaaggcaattaaatttactgtggagagaagagctaatctaatggggagaaggagcctttgttacaggtgtggtagtgtggttctttgagtgacaagatttctgtttgccagattggttaggagaagtctgtgtgtctgctttctctcttatggcctaggatcactgtggtgaatgaaaaacctgtctcagggcctgactcagataattcccttaaaacccggctaaggtcatagatgaataatcagtaattgaacagaagctctgcaatagaaaagaagccagataattatttttggaaatttaattatatttacagattttattttatacagtagacatggaattaaatttattacattatgttctaatttactctttgcttgttttgatttgcttgtttgacaatacatgtccttgtaaactatttccttttaactttttctcaatttatggtgcttattttccccattaaagacttaccaattttttttttaactatttgttacacatactgaatctagagttgtaattaagctactttcattactggttaagtcaaattatagcaaatgctactataaaaatttactatccaaaaatgtgtctcaagccccaactgatggtttcaaattctgttattaataatatgcagcattgtgtttgcaaagcttggctgttacttgtgatgcttgagaatgatgagtcactcagctaaactgagtgattttgagacttgtgtacaaattgatggttgaatgtaagcatgcaaagagagaccttagcttagcagtaccctttttgaaatcactctgacatcaagtttgaaaatgtgggcaataatcagaggtggtaaggtggccaggctttagctgaatacttttttaactggttcagtctgagggctgaaagccccagatttaaacagtatttagaatttgaagcagtcaagtattagtttaatggttgtcaggtttgtaacaaagtttctggctagacttctactagaaatgtaaaagtgcatgtgaatcagctttttaaaaaagtaataataattgaaaaacatttctacaactagaactaaagaaaagatttgtcctttctaataggaaaacacatctggagaagtgctggcaactagcagaacagttaggaccattcagaatcaactgaagtgaaagtgacggggagctgaggggaacacagatagtttgacttcagtcagacagaataaacatgatgaaccgataacctgtgattcccagcctggggttactactggagttttaggtgtcctggaaagttataataccggtcttcaaaaagtctacagaaagcatagatttccacataatgctgcacaggctaacgaattaatcaagtttctttggtttggcctggatttatatccattcagtttgtggacactactgaattatttatgtcatgttgatcaaaagttctgatatgatttgattaatgaaacattgaaaaaaatagtaaaaccaaccatttttaaccttacactactatcttgaggtatgattgacatacattaaaaccacctcttaataaatgcttcttgttaatcaaaaatttgaaaacgtatgtccactggaggaaaaaagacatagccctggatgtgaactgaatattactgagactcggagaccttcagaactacctgaagatgaatcgaagtgctgcctactttagagaattggactaatttaatttgggagtcagcagattgctgtatatcagtcatcatatataccggtgacaagaccacttagttcattcccttttttagattctgtaagattattgtgttccagtgaaattgatttgcaaaatgagacattttattttctgtgcttttgttctatcatgtttctgattggtcataagcatctcacagaagtaagaaatatggcgattcagaaggcaacaagcacatttataatttatagaaaatatttgaaggactttttcatggcccaaatcatgaaaagtagtagtattgttttaagtataattattaaattataatacattaatgttctttcttgcaacatattactctcattctttttttttttttttttttttgagacggagtctcactctgtcacccggctggagtacagtggtacgatcttggcccactgcaacctctgcctcccgggttcaagcgattctcctgcctcagcctcccaagtagctgggattacaggctcctgccaccacgcctagctaatttttgtatttttagtagagacagggtttcaccaggttggccaggatggtcttgatctcttgacctcatggtccgtccacctctgcctcccaaagtgttgggattacaggcgtgagccacccagcagtctgattcttaattttatagtttatgttgtacctccccagctgaagtatctcttttcttttttcccgcgtgtttagtgttcactcatctttatagcatagctcaattgtcacttcatgaagccttccataacctttgtagctccattaattatattcttctgagtgtttaaaacacttgccatatgaaacactatttactttggcttacattcttactatctaatcggccatttctgttactaaatctttttctcagagcacctgggatagtcttgtgtcttagtaaaatcagttgattgatttaactcggtagagtagaggctgattaaagtaaataaatctggttgatgccaacaaaattttggtcccctcaattttttgctctcattacctgcaaattctccctggccttcatatttggcaaccattgaggagaacaaggctgtaaaagtagttcatgtacttgatattctgaattggaattaagcagagttgcttaagtaggacttgcttttctgggatttcttatgcaacaaataatgtagtaactggaaatccaagttcaagacactggcagattcgatgtcttttgaggacccttggcttcatagatgatgccttctccctatatccttacatagcaaaaggggccaggcagctctggcctttttttgtaaggccaataactccagaaacctcatgacctcatcacctcccaaaggccccacctctcaatactatcacattgtgaggctaggtttcaacatatgaattgtgggagacaaaaattcagaccatagtataatatttcaagattacttaaactcttctctaccaaactcattaacttttaggttagcacagtattttcattgatattttggtttctggagttattactaattttcttgatctgatgttataattaaaaaaaaacaggactttgtacgtgaaatgagactgagataaggaagctgattcagagatggagatttaaaaaaagagagatgagagattgagatctgcagtgtcaaactgacaatagccaggagtcaggagatattaagagactatatcatctgtgattgttaatgattatttattgttatttataaatactactgtattttatatattatatacattgttttaaaaattatttttgtaccatttcttgaaagaaaaatgtctaagcttgggaaaatatttattgaaaaatgtggtttgtacatctgaggagtgtatcttgcacagtaggtgcatagatttcttcctcttcctgttccacatggccttagcttagaggctgtgtggccatcacttggtatttagggtaagactggtgcacaaaatcaaagacaggtaaccttggtataagtgtagtatcatgtaaatagcttttctatgtctaattcttgttttcttcctactttttcaggaggtcaatttcagttcatttcaactatctttacataatagtgctttagtaacaggcatggaaggaaagagacatgtccctagagtgttttcttgaaatctaatagatgattggagtatttaccatgcagttgtgtatatacataagcagtgaattcgagaggaatttttaagctgtaaaaaaaagcattgtgtgccttatagacgcgagtgagaaatgtggaatatggctgatccaaagggaatgagttatctcaattgattaatcacagtcagttacagattgaactctttgttctactctttgcccccttctcactattgctcttgactagtcttaagaaagaaatgtggaatattttctcacggctttgggattttataaattagaatactagtggtatgtaaatacagcaggtacactactgtataaaccaacataggaagccttctttaaagggaattgtttgagaaatttgaacacttggataatttgaataaaggattgtgataaatgatcaaatgaaagaaaataaatcaggttactcttctttctgcttgataaagcaataattttttttaaaggtaaaaattatgagaatgatgaggatagtagttagcattgtctttctttgataggtttgttaatgatcataaaactgatttatttaaagacatgtctttttataactattttatactgttgtatctggaaacaaatattgaatttcatttgtcatgtggaagaaatcaactagttttaacctttgatttataataaatcaaccactttcatttattgtctaatactggcaatgaacacagcctaatgtatcaaaactaacagaataaaaattctccaagttatatccagactttaagacactttctaattatataaaataaaatattttgggcagtcattttttaactctgaaactatttaaaactcctaatttagaatatcttaataaatacccattttcctctttttatttttataacttggtaaaaattgagtccattgttttcccagaacgctgttcttaaacaaatggttacctccttcattagaactttactttttttaggatttctaattaagaaaacattaggcttgtaacattgtcaaatcttggtggtctttcttccacgttttttgaggtcgattatctaagaggccatcagttaataaagctatgcaggaaatgacatcatgccacatgtgaatatcctgtattaaaaattgtatcaatatactattttataattatgaagtggaatgaattttagaaatagaaaaggtgattttttgtgcataggtccaaactgtgttttgttttcatttcagaatttcataataactatattgtctccatatcttaattgtgtttttttatagcacttttgtttagtaatttgtatatgcttggctgtattctcagaggctgtttctatttaatgttgtcaaaacagctcataaaaagtgaaaattcggtcagactagttatttgatattatatatgaaatcaaaacaacctgaaacattatcttttaatttaaataaagaaccccaaattttaatcaaatgtatgcaaaggcacatagaatatatgacttaatgtacaacctttattaacttgatgatggaaacctgttcctagggacctttacttgaataaatgaaatatcaagaaaaaatactaacttaagaataataatttaataagtaagtaagctattatgatcttcaatcagtcctgagagaatcatggttgagaattagaaaatttagaccagtaagatcaacactgttaaaaaaaaaaaaaaatcagtattttttctccatattttttatatatctggatcattttatttagcacttattattgcactttccttttcactttttaaactatgctgttttatttttctgagacatctgatttactgaggaggaaaatggaaatgcggtacagagcccaagggtatgacggctttaaatgagtttccatttctgttttaagttaaccatccctccctagcttacatctgttcctttgttgcacccttggtttaacattattctcctccccaatttcctcttctcctcattgtgaactcgtggcag

SEQ ID NO: 277 - DNA, 111 bp, Homo sapiens
  source 1..111: mol_type = genomic DNA
ggtctgcttggtgagctcattctcttacaacaacaaattcaagagcatgaagaggaagcgcgcagagccgctggccaatatagcacgagctatgcccaacagaagcgcaag

SEQ ID NO: 278 - DNA, 5409 bp, Homo sapiens; identical to SEQ ID NO: 2
  source 1..5409: mol_type = genomic DNA

SEQ ID NO: 279 - DNA, 108 bp, Homo sapiens
  source 1..108: mol_type = genomic DNA
ctttagcttgtttctgcggaggattccgctctttctccatcagtttcatagccctggaattgtagaaaagctctggtttcaagaccattgatatccatttctgtcagg

SEQ ID NO: 280 - DNA, 18 bp, synthetic construct
  source 1..18: mol_type = other DNA
tcttgaatttgttgttgt

SEQ ID NO: 281 - DNA, 18 bp, synthetic construct
  source 1..18: mol_type = other DNA
ctcttgaatttgttgttg

SEQ ID NO: 282 - DNA, 18 bp, synthetic construct
  source 1..18: mol_type = other DNA
gctcttgaatttgttgtt

SEQ ID NO: 283 - DNA, 18 bp, synthetic construct
  source 1..18: mol_type = other DNA
tgctcttgaatttgttgt

SEQ ID NO: 284 - DNA, 18 bp, synthetic construct
  source 1..18: mol_type = other DNA
catgctcttgaatttgtt

SEQ ID NO: 285 - DNA, 18 bp, synthetic construct
  source 1..18: mol_type = other DNA
tcatgctcttgaatttgt

SEQ ID NO: 286 - DNA, 18 bp, synthetic construct
  source 1..18: mol_type = other DNA
ttcatgctcttgaatttg

SEQ ID NO: 287 - DNA, 18 bp, synthetic construct
  source 1..18: mol_type = other DNA
cttcatgctcttgaattt

SEQ ID NO: 288 - DNA, 16 bp, synthetic construct
  source 1..16: mol_type = other DNA
tgaatttgttgttgta

SEQ ID NO: 289 - DNA, 16 bp, synthetic construct
  source 1..16: mol_type = other DNA
ttgaatttgttgttgt

SEQ ID NO: 290 - DNA, 16 bp, synthetic construct
  source 1..16: mol_type = other DNA
cttgaatttgttgttg

SEQ ID NO: 291 - DNA, 16 bp, synthetic construct
  source 1..16: mol_type = other DNA
tcttgaatttgttgtt

SEQ ID NO: 292 - DNA, 16 bp, synthetic construct
  source 1..16: mol_type = other DNA
ctcttgaatttgttgt

SEQ ID NO: 293 - DNA, 16 bp, synthetic construct
  source 1..16: mol_type = other DNA
gctcttgaatttgttg

SEQ ID NO: 294 - DNA, 16 bp, synthetic construct
  source 1..16: mol_type = other DNA
tgctcttgaatttgtt

SEQ ID NO: 295 - DNA, 16 bp, synthetic construct
  source 1..16: mol_type = other DNA
atgctcttgaatttgt

SEQ ID NO: 296 - DNA, 16 bp, synthetic construct
  source 1..16: mol_type = other DNA
catgctcttgaatttg

SEQ ID NO: 297 - DNA, 16 bp, synthetic construct
  source 1..16: mol_type = other DNA
tcatgctcttgaattt

SEQ ID NO: 298 - DNA, 16 bp, synthetic construct
  source 1..16: mol_type = other DNA
ttcatgctcttgaatt

SEQ ID NO: 299 - DNA, 16 bp, synthetic construct
  source 1..16: mol_type = other DNA
cttcatgctcttgaat

SEQ ID NO: 300 - DNA, 308 bp, synthetic construct
  source 1..308: mol_type = other DNA
atttcagaatggcctcaatgccttaataggaagaaatacttgaaatttttaaattagggcttggttttgtgaggagctagtaaaggtttttctctttcagctttagcttgtttctgcggaggattccgctctttctccatcagtttcatagccctggaattgtagaaaagctctggtttcaagaccattgatatccatttctgtcagggtgagttttaaatttatttcatgatgcaaacaatatattgaacaacaggacatgaacttgttcttgttgtaagtggctgaattttatcagtaaagcacat

SEQ ID NO: 301 - DNA, 258 bp, synthetic construct
  source 1..258: mol_type = other DNA
attgagcataaaaatctgctaaagcatttcactgatatttgggttcatttctacaagtatgagcttcagtcttaataacagcaatctgcatttgtaacaggatagcagaaaggagctcatctgtttggagtccatttttgatggggatcccactagaggtgagaaaccttcgtagtttccatatcatgccaaaatcacgtactactccaaaagcatgtctactatccgtaaatatttactgacttgtccttagctgtg

SEQ ID NO: 302 - DNA, 110 bp, synthetic construct
  source 1..110: mol_type = other DNA
gtatttcagaatttcagaatggcctcaatgccttaataggaagaaatacttgaaatttttaaattagggcttggttttgtgaggagctagtaaaggtttttctctttcag

SEQ ID NO: 303 - DNA, 151 bp, synthetic construct
  source 1..151: mol_type = other DNA
gagctagtaaaggtttttctctttcagctttagcttgtttctgcggaggattccgctctttctccatcagtttcatagccctggaattgtagaaaagctctggtttcaagaccattgatatccatttctgtcagggtgagttttaaattta

SEQ ID NO: 304 - DNA, 104 bp, synthetic construct
  source 1..104: mol_type = other DNA
gtgagttttaaatttatttcatgatgcaaacaatatattgaacaacaggacatgaacttgttcttgttgtaagtggctgaattttatcagtaaagcacatcaaa

SEQ ID NO: 305 - RNA, 18 nt, synthetic construct
  source 1..18: mol_type = other RNA
  modified_base 1: mod_base = OTHER; note = 2'-O-methoxyethyl-adenosine
  modified_base 2: mod_base = OTHER; note = 2'-O-methoxyethyl-guanosine
  modified_base 3: mod_base = OTHER; note = 2'-O-methoxyethyl-guanosine
  modified_base 4: mod_base = OTHER; note = 2'-O-methoxyethyl-5'-methylcytidine
  modified_base 5: mod_base = OTHER; note = 2'-O-methoxyethyl-5'-methylcytidine
  modified_base 6: mod_base = OTHER; note = 2'-O-methoxyethyl-adenosine
  modified_base 7: mod_base = OTHER; note = 2'-O-methoxyethyl-thymidine
  modified_base 8: mod_base = OTHER; note = 2'-O-methoxyethyl-thymidine
  modified_base 9: mod_base = OTHER; note = 2'-O-methoxyethyl-5'-methylcytidine
  modified_base 10: mod_base = OTHER; note = 2'-O-methoxyethyl-thymidine
  modified_base 11: mod_base = OTHER; note = 2'-O-methoxyethyl-guanosine
  modified_base 12: mod_base = OTHER; note = 2'-O-methoxyethyl-adenosine
  modified_base 13: mod_base = OTHER; note = 2'-O-methoxyethyl-adenosine
  modified_base 14: mod_base = OTHER; note = 2'-O-methoxyethyl-adenosine
  modified_base 15: mod_base = OTHER; note = 2'-O-methoxyethyl-thymidine
  modified_base 16: mod_base = OTHER; note = 2'-O-methoxyethyl-thymidine
  modified_base 17: mod_base = OTHER; note = 2'-O-methoxyethyl-5'-methylcytidine
  modified_base 18: mod_base = OTHER; note = 2'-O-methoxyethyl-thymidine
aggccattctgaaattct

SEQ ID NO: 306 - RNA, 18 nt, synthetic construct
  source 1..18: mol_type = other RNA
  modified_base 1: mod_base = OTHER; note = 2'-O-methoxyethyl-5'-methylcytidine
  modified_base 2: mod_base = OTHER; note = 2'-O-methoxyethyl-adenosine
  modified_base 3: mod_base = OTHER; note = 2'-O-methoxyethyl-thymidine
  modified_base 4: mod_base = OTHER; note = 2'-O-methoxyethyl-thymidine
  modified_base 5: mod_base = OTHER; note = 2'-O-methoxyethyl-guanosine
  modified_base 6: mod_base = OTHER; note = 2'-O-methoxyethyl-adenosine
  modified_base 7: mod_base = OTHER; note = 2'-O-methoxyethyl-guanosine
  modified_base 8: mod_base = OTHER; note = 2'-O-methoxyethyl-guanosine
  modified_base 9: mod_base = OTHER; note = 2'-O-methoxyethyl-5'-methylcytidine
  modified_base 10: mod_base = OTHER; note = 2'-O-methoxyethyl-5'-methylcytidine
  modified_base 11: mod_base = OTHER; note = 2'-O-methoxyethyl-adenosine
  modified_base 12: mod_base = OTHER; note = 2'-O-methoxyethyl-thymidine
  modified_base 13: mod_base = OTHER; note = 2'-O-methoxyethyl-thymidine
  modified_base 14: mod_base = OTHER; note = 2'-O-methoxyethyl-5'-methylcytidine
  modified_base 15: mod_base = OTHER; note = 2'-O-methoxyethyl-thymidine
  modified_base 16: mod_base = OTHER; note = 2'-O-methoxyethyl-guanosine
  modified_base 17: mod_base = OTHER; note = 2'-O-methoxyethyl-adenosine
  modified_base 18: mod_base = OTHER; note = 2'-O-methoxyethyl-adenosine
cattgaggccattctgaa

SEQ ID NO: 307 - RNA, 18 nt, synthetic construct
  source 1..18: mol_type = other RNA
  modified_base 1: mod_base = OTHER; note = 2'-O-methoxyethyl-thymidine
  modified_base 2: mod_base = OTHER; note = 2'-O-methoxyethyl-adenosine
  modified_base 3: mod_base = OTHER; note = 2'-O-methoxyethyl-adenosine
  modified_base 4: mod_base = OTHER; note = 2'-O-methoxyethyl-guanosine
  modified_base 5: mod_base = OTHER; note = 2'-O-methoxyethyl-guanosine
  modified_base 6: mod_base = OTHER; note = 2'-O-methoxyethyl-5'-methylcytidine
  modified_base 7: mod_base = OTHER; note = 2'-O-methoxyethyl-adenosine
  modified_base 8: mod_base = OTHER; note = 2'-O-methoxyethyl-thymidine
  modified_base 9: mod_base = OTHER; note = 2'-O-methoxyethyl-thymidine
  modified_base 10: mod_base = OTHER; note = 2'-O-methoxyethyl-guanosine
  modified_base 11: mod_base = OTHER; note = 2'-O-methoxyethyl-adenosine
  modified_base 12: mod_base = OTHER; note = 2'-O-methoxyethyl-guanosine
  modified_base 13: mod_base = OTHER; note = 2'-O-methoxyethyl-guanosine
  modified_base 14: mod_base = OTHER; note = 2'-O-methoxyethyl-5'-methylcytidine
  modified_base 15: mod_base = OTHER; note = 2'-O-methoxyethyl-5'-methylcytidine
  modified_base 16: mod_base = OTHER; note = 2'-O-methoxyethyl-adenosine
  modified_base 17: mod_base = OTHER; note = 2'-O-methoxyethyl-thymidine
  modified_base 18: mod_base = OTHER; note = 2'-O-methoxyethyl-thymidine
taaggcattgaggccatt

SEQ ID NO: 308 - RNA, 18 nt, synthetic construct
  source 1..18: mol_type = other RNA
  modified_base 1: mod_base = OTHER; note = 2'-O-methoxyethyl-5'-methylcytidine
  modified_base 2: mod_base = OTHER; note = 2'-O-methoxyethyl-5'-methylcytidine
  modified_base 3: mod_base = OTHER; note = 2'-O-methoxyethyl-thymidine
  modified_base 4: mod_base = OTHER; note = 2'-O-methoxyethyl-adenosine
  modified_base 5: mod_base = OTHER; note = 2'-O-methoxyethyl-thymidine
  modified_base 6: mod_base = OTHER; note = 2'-O-methoxyethyl-thymidine
  modified_base 7: mod_base = OTHER; note = 2'-O-methoxyethyl-adenosine
  modified_base 8: mod_base = OTHER; note = 2'-O-methoxyethyl-adenosine
  modified_base 9: mod_base = OTHER; note = 2'-O-methoxyethyl-guanosine
  modified_base 10: mod_base = OTHER; note = 2'-O-methoxyethyl-guanosine
  modified_base 11: mod_base = OTHER; note = 2'-O-methoxyethyl-5'-methylcytidine
  modified_base 12: mod_base = OTHER; note = 2'-O-methoxyethyl-adenosine
  modified_base 13: mod_base = OTHER; note = 2'-O-methoxyethyl-thymidine
  modified_base 14: mod_base = OTHER; note = 2'-O-methoxyethyl-thymidine
  modified_base 15: mod_base = OTHER; note = 2'-O-methoxyethyl-guanosine
  modified_base 16: mod_base = OTHER; note = 2'-O-methoxyethyl-adenosine
  modified_base 17: mod_base = OTHER; note = 2'-O-methoxyethyl-guanosine
  modified_base 18: mod_base = OTHER; note = 2'-O-methoxyethyl-guanosine
cctattaaggcattgagg

SEQ ID NO: 309 - RNA, 18 nt, synthetic construct
  source 1..18: mol_type = other RNA
  modified_base 1: mod_base = OTHER; note = 2'-O-methoxyethyl-thymidine
  modified_base 2: mod_base = OTHER; note = 2'-O-methoxyethyl-thymidine
  modified_base 3: mod_base = OTHER; note = 2'-O-methoxyethyl-5'-methylcytidine
  modified_base 4: mod_base = OTHER; note = 2'-O-methoxyethyl-thymidine
  modified_base 5: mod_base = OTHER; note = 2'-O-methoxyethyl-thymidine
  modified_base 6: mod_base = OTHER; note = 2'-O-methoxyethyl-5'-methylcytidine
  modified_base 7: mod_base = OTHER; note = 2'-O-methoxyethyl-5'-methylcytidine
  modified_base 8: mod_base = OTHER; note = 2'-O-methoxyethyl-thymidine
  modified_base 9: mod_base = OTHER; note = 2'-O-methoxyethyl-adenosine
  modified_base 10: mod_base = OTHER; note = 2'-O-methoxyethyl-thymidine
  modified_base 11: mod_base = OTHER; note = 2'-O-methoxyethyl-thymidine
  modified_base 12: mod_base = OTHER; note = 2'-O-methoxyethyl-adenosine
  modified_base 13: mod_base = OTHER; note = 2'-O-methoxyethyl-adenosine
  modified_base 14: mod_base = OTHER; note = 2'-O-methoxyethyl-guanosine
  modified_base 15: mod_base = OTHER; note = 2'-O-methoxyethyl-guanosine
  modified_base 16: mod_base = OTHER; note = 2'-O-methoxyethyl-5'-methylcytidine
  modified_base 17: mod_base = OTHER; note = 2'-O-methoxyethyl-adenosine
  modified_base 18: mod_base = OTHER; note = 2'-O-methoxyethyl-thymidine
ttcttcctattaaggcat

SEQ ID NO: 310 - RNA, 18 nt, synthetic construct
  source 1..18: mol_type = other RNA
  modified_base 1: mod_base = OTHER; note = 2'-O-methoxyethyl-adenosine
  modified_base 2: mod_base = OTHER; note = 2'-O-methoxyethyl-guanosine
  modified_base 3: mod_base = OTHER; note = 2'-O-methoxyethyl-thymidine
  modified_base 4: mod_base = OTHER; note = 2'-O-methoxyethyl-adenosine
  modified_base 5: mod_base = OTHER; note = 2'-O-methoxyethyl-thymidine
  modified_base 6: mod_base = OTHER; note = 2'-O-methoxyethyl-thymidine
  modified_base 7: mod_base = OTHER; note = 2'-O-methoxyethyl-thymidine
  modified_base 8: mod_base = OTHER; note = 2'-O-methoxyethyl-5'-methylcytidine
  modified_base 9: mod_base = OTHER; note = 2'-O-methoxyethyl-thymidine
  modified_base 10: mod_base = OTHER; note = 2'-O-methoxyethyl-thymidine
  modified_base 11: mod_base = OTHER; note = 2'-O-methoxyethyl-5'-methylcytidine
  modified_base 12: mod_base = OTHER; note = 2'-O-methoxyethyl-5'-methylcytidine
  modified_base 13: mod_base = OTHER; note = 2'-O-methoxyethyl-thymidine
  modified_base 14: mod_base = OTHER; note = 2'-O-methoxyethyl-adenosine
  modified_base 15: mod_base = OTHER; note = 2'-O-methoxyethyl-thymidine
  modified_base 16: mod_base = OTHER; note = 2'-O-methoxyethyl-thymidine
  modified_base 17: mod_base = OTHER; note = 2'-O-methoxyethyl-adenosine
  modified_base 18: mod_base = OTHER; note = 2'-O-methoxyethyl-adenosine
agtatttcttcctattaa

SEQ ID NO: 311 - RNA, 18 nt, synthetic construct
  source 1..18: mol_type = other RNA
  modified_base 1: mod_base = OTHER; note = 2'-O-methoxyethyl-thymidine
  modified_base 2: mod_base = OTHER; note = 2'-O-methoxyethyl-thymidine
  modified_base 3: mod_base = OTHER; note = 2'-O-methoxyethyl-thymidine
  modified_base 4: mod_base = OTHER; note = 2'-O-methoxyethyl-5'-methylcytidine
  modified_base 5: mod_base = OTHER; note = 2'-O-methoxyethyl-adenosine
  modified_base 6: mod_base = OTHER; note = 2'-O-methoxyethyl-adenosine
  modified_base 7: mod_base = OTHER; note = 2'-O-methoxyethyl-guanosine
  modified_base 8: mod_base = OTHER; note = 2'-O-methoxyethyl-thymidine
  modified_base 9: mod_base = OTHER; note = 2'-O-methoxyethyl-adenosine
  modified_base 10: mod_base = OTHER; note = 2'-O-methoxyethyl-thymidine
  modified_base 11: mod_base = OTHER; note = 2'-O-methoxyethyl-thymidine
  modified_base 12: mod_base = OTHER; note = 2'-O-methoxyethyl-thymidine
  modified_base 13: mod_base = OTHER; note = 2'-O-methoxyethyl-5'-methylcytidine
  modified_base 14: mod_base = OTHER; note = 2'-O-methoxyethyl-thymidine
  modified_base 15: mod_base = OTHER; note = 2'-O-methoxyethyl-thymidine
  modified_base 16: mod_base = OTHER; note = 2'-O-methoxyethyl-5'-methylcytidine
  modified_base 17: mod_base = OTHER; note = 2'-O-methoxyethyl-5'-methylcytidine
  modified_base 18: mod_base = OTHER; note = 2'-O-methoxyethyl-thymidine
tttcaagtatttcttcct

SEQ ID NO: 312 - RNA, 18 nt, synthetic construct
  source 1..18: mol_type = other RNA
  modified_base 1: mod_base = OTHER; note = 2'-O-methoxyethyl-adenosine
  modified_base 2: mod_base = OTHER; note = 2'-O-methoxyethyl-adenosine
  modified_base 3: mod_base = OTHER; note = 2'-O-methoxyethyl-adenosine
  modified_base 4: mod_base = OTHER; note = 2'-O-methoxyethyl-adenosine
  modified_base 5: mod_base = OTHER; note = 2'-O-methoxyethyl-adenosine
  modified_base 6: mod_base = OTHER; note = 2'-O-methoxyethyl-thymidine
  modified_base 7: mod_base = OTHER; note = 2'-O-methoxyethyl-thymidine
  modified_base 8: mod_base = OTHER; note = 2'-O-methoxyethyl-thymidine
  modified_base 9: mod_base = OTHER; note = 2'-O-methoxyethyl-5'-methylcytidine
  modified_base 10: mod_base = OTHER; note = 2'-O-methoxyethyl-adenosine
  modified_base 11: mod_base = OTHER; note = 2'-O-methoxyethyl-adenosine
  modified_base 12: mod_base = OTHER; note = 2'-O-methoxyethyl-guanosine
  modified_base 13: mod_base = OTHER; note = 2'-O-methoxyethyl-thymidine
  modified_base 14: mod_base = OTHER; note = 2'-O-methoxyethyl-adenosine
  modified_base 15: mod_base = OTHER; note = 2'-O-methoxyethyl-thymidine
  modified_base 16: mod_base = OTHER; note = 2'-O-methoxyethyl-thymidine
  modified_base 17: mod_base = OTHER; note = 2'-O-methoxyethyl-thymidine
  modified_base 18: mod_base = OTHER; note = 2'-O-methoxyethyl-5'-methylcytidine
aaaaatttcaagtatttc

SEQ ID NO: 313 - RNA, 18 nt, synthetic construct
  source 1..18: mol_type = other RNA
  modified_base 1: mod_base = OTHER; note = 2'-O-methoxyethyl-adenosine
  modified_base 2: mod_base = OTHER; note = 2'-O-methoxyethyl-adenosine
  modified_base 3: mod_base = OTHER; note = 2'-O-methoxyethyl-thymidine
  modified_base 4: mod_base = OTHER; note = 2'-O-methoxyethyl-thymidine
  modified_base 5: mod_base = OTHER; note = 2'-O-methoxyethyl-thymidine
  modified_base 6: mod_base = OTHER; note = 2'-O-methoxyethyl-adenosine
  modified_base 7: mod_base = OTHER; note = 2'-O-methoxyethyl-adenosine
  modified_base 8: mod_base = OTHER; note = 2'-O-methoxyethyl-adenosine
  modified_base 9: mod_base = OTHER; note = 2'-O-methoxyethyl-adenosine
  modified_base 10: mod_base = OTHER; note = 2'-O-methoxyethyl-adenosine
  modified_base 11: mod_base = OTHER; note = 2'-O-methoxyethyl-thymidine
  modified_base 12: mod_base = OTHER; note = 2'-O-methoxyethyl-thymidine
  modified_base 13: mod_base = OTHER; note = 2'-O-methoxyethyl-thymidine
  modified_base 14: mod_base = OTHER; note = 2'-O-methoxyethyl-5'-methylcytidine
  modified_base 15: mod_base = OTHER; note = 2'-O-methoxyethyl-adenosine
  modified_base 16: mod_base = OTHER; note = 2'-O-methoxyethyl-adenosine
  modified_base 17: mod_base = OTHER; note = 2'-O-methoxyethyl-guanosine
  modified_base 18: mod_base = OTHER; note = 2'-O-methoxyethyl-thymidine
aatttaaaaatttcaagt

SEQ ID NO: 314 - RNA, 18 nt, synthetic construct
  source 1..18: mol_type = other RNA
  modified_base 1: mod_base = OTHER; note = 2'-O-methoxyethyl-guanosine
  modified_base 2: mod_base = OTHER; note = 2'-O-methoxyethyl-5'-methylcytidine
  modified_base 3: mod_base = OTHER; note = 2'-O-methoxyethyl-5'-methylcytidine
  modified_base 4: mod_base = OTHER; note = 2'-O-methoxyethyl-5'-methylcytidine
  modified_base 5: mod_base = OTHER; note = 2'-O-methoxyethyl-thymidine
  modified_base 6: mod_base = OTHER; note = 2'-O-methoxyethyl-adenosine
  modified_base 7: mod_base = OTHER; note = 2'-O-methoxyethyl-adenosine
  modified_base 8: mod_base = OTHER; note = 2'-O-methoxyethyl-thymidine
  modified_base 9: mod_base = OTHER; note = 2'-O-methoxyethyl-thymidine
  modified_base 10: mod_base = OTHER; note = 2'-O-methoxyethyl-thymidine
  modified_base 11: mod_base = OTHER; note = 2'-O-methoxyethyl-adenosine
  modified_base 12: mod_base = OTHER; note = 2'-O-methoxyethyl-adenosine
  modified_base 13: mod_base = OTHER; note = 2'-O-methoxyethyl-adenosine
  modified_base 14: mod_base = OTHER; note = 2'-O-methoxyethyl-adenosine
  modified_base 15: mod_base = OTHER; note = 2'-O-methoxyethyl-adenosine
  modified_base 16: mod_base = OTHER; note = 2'-O-methoxyethyl-thymidine
  modified_base 17: mod_base = OTHER; note = 2'-O-methoxyethyl-thymidine
  modified_base 18: mod_base = OTHER; note = 2'-O-methoxyethyl-thymidine
gccctaatttaaaaattt

SEQ ID NO: 315 - RNA, 18 nt, synthetic construct
  source 1..18: mol_type = other RNA
  modified_base 1: mod_base = OTHER; note = 2'-O-methoxyethyl-adenosine
  modified_base 2: mod_base = OTHER; note = 2'-O-methoxyethyl-5'-methylcytidine
  modified_base 3: mod_base = OTHER; note = 2'-O-methoxyethyl-5'-methylcytidine
  modified_base 4: mod_base = OTHER; note = 2'-O-methoxyethyl-adenosine
  modified_base 5: mod_base = OTHER; note = 2'-O-methoxyethyl-adenosine
  modified_base 6: mod_base = OTHER; note = 2'-O-methoxyethyl-guanosine
  modified_base 7: mod_base = OTHER; note = 2'-O-methoxyethyl-5'-methylcytidine
  modified_base 8: mod_base = OTHER; note = 2'-O-methoxyethyl-5'-methylcytidine
  modified_base 9: mod_base = OTHER; note = 2'-O-methoxyethyl-5'-methylcytidine
  modified_base 10: mod_base = OTHER; note = 2'-O-methoxyethyl-thymidine
  modified_base 11: mod_base = OTHER; note = 2'-O-methoxyethyl-adenosine
  modified_base 12: mod_base = OTHER; note = 2'-O-methoxyethyl-adenosine
  modified_base 13: mod_base = OTHER; note = 2'-O-methoxyethyl-thymidine
  modified_base 14: mod_base = OTHER; note = 2'-O-methoxyethyl-thymidine
  modified_base 15: mod_base = OTHER; note = 2'-O-methoxyethyl-thymidine
  modified_base 16: mod_base = OTHER; note = 2'-O-methoxyethyl-adenosine
  modified_base 17: mod_base = OTHER; note = 2'-O-methoxyethyl-adenosine
  modified_base 18: mod_base = OTHER; note = 2'-O-methoxyethyl-adenosine
accaagccctaatttaaa

SEQ ID NO: 316 - RNA, 18 nt, synthetic construct
  source 1..18: mol_type = other RNA
  modified_base 1: mod_base = OTHER; note = 2'-O-methoxyethyl-adenosine
  modified_base 2: mod_base = OTHER; note = 2'-O-methoxyethyl-5'-methylcytidine
  modified_base 3: mod_base = OTHER; note = 2'-O-methoxyethyl-adenosine
  modified_base 4: mod_base = OTHER; note = 2'-O-methoxyethyl-adenosine
  modified_base 5: mod_base = OTHER; note = 2'-O-methoxyethyl-adenosine
  modified_base 6: mod_base = OTHER; note = 2'-O-methoxyethyl-adenosine
  modified_base 7: mod_base = OTHER; note = 2'-O-methoxyethyl-5'-methylcytidine
  modified_base 8: mod_base = OTHER; note = 2'-O-methoxyethyl-5'-methylcytidine
  modified_base 9: mod_base = OTHER; note = 2'-O-methoxyethyl-adenosine
  modified_base 10: mod_base = OTHER; note = 2'-O-methoxyethyl-adenosine
  modified_base 11: mod_base = OTHER; note = 2'-O-methoxyethyl-guanosine
  modified_base 12: mod_base = OTHER; note = 2'-O-methoxyethyl-5'-methylcytidine
  modified_base 13: mod_base = OTHER; note = 2'-O-methoxyethyl-5'-methylcytidine
  modified_base 14: mod_base = OTHER; note = 2'-O-methoxyethyl-5'-methylcytidine
  modified_base 15: mod_base = OTHER; note = 2'-O-methoxyethyl-thymidine
  modified_base 16: mod_base = OTHER; note = 2'-O-methoxyethyl-adenosine
  modified_base 17: mod_base = OTHER; note = 2'-O-methoxyethyl-adenosine
  modified_base 18: mod_base = OTHER; note = 2'-O-methoxyethyl-thymidine
acaaaaccaagccctaat

SEQ ID NO: 317 - RNA, 18 nt, synthetic construct
  source 1..18: mol_type = other RNA
  modified_base 1: mod_base = OTHER; note = 2'-O-methoxyethyl-thymidine
  modified_base 2: mod_base = OTHER; note = 2'-O-methoxyethyl-5'-methylcytidine
  modified_base 3: mod_base = OTHER; note = 2'-O-methoxyethyl-5'-methylcytidine
  modified_base 4: mod_base = OTHER; note = 2'-O-methoxyethyl-thymidine
  modified_base 5: mod_base = OTHER; note = 2'-O-methoxyethyl-5'-methylcytidine
  modified_base 6: mod_base = OTHER; note = 2'-O-methoxyethyl-adenosine
  modified_base 7: mod_base = OTHER; note = 2'-O-methoxyethyl-5'-methylcytidine
  modified_base 8: mod_base = OTHER; note = 2'-O-methoxyethyl-adenosine
  modified_base 9: mod_base = OTHER; note = 2'-O-methoxyethyl-adenosine
  modified_base 10: mod_base = OTHER; note = 2'-O-methoxyethyl-adenosine
  modified_base 11: mod_base = OTHER; note = 2'-O-methoxyethyl-adenosine
  modified_base 12: mod_base = OTHER; note = 2'-O-methoxyethyl-5'-methylcytidine
  modified_base 13: mod_base = OTHER; note = 2'-O-methoxyethyl-5'-methylcytidine
  modified_base 14: mod_base = OTHER; note = 2'-O-methoxyethyl-adenosine
  modified_base 15: mod_base = OTHER; note = 2'-O-methoxyethyl-adenosine
  modified_base 16: mod_base = OTHER; note = 2'-O-methoxyethyl-guanosine
  modified_base 17: mod_base = OTHER; note = 2'-O-methoxyethyl-5'-methylcytidine
  modified_base 18: mod_base = OTHER; note = 2'-O-methoxyethyl-5'-methylcytidine
tcctcacaaaaccaagcc

SEQ ID NO: 318 - RNA, 18 nt, synthetic construct
  source 1..18: mol_type = other RNA
  modified_base 1: mod_base = OTHER; note = 2'-O-methoxyethyl-5'-methylcytidine
  modified_base 2: mod_base = OTHER; note = 2'-O-methoxyethyl-thymidine
  modified_base 3: mod_base = OTHER; note = 2'-O-methoxyethyl-adenosine
  modified_base 4: mod_base = OTHER; note = 2'-O-methoxyethyl-guanosine
  modified_base 5: mod_base = OTHER; note = 2'-O-methoxyethyl-5'-methylcytidine
  modified_base 6: mod_base = OTHER; note = 2'-O-methoxyethyl-thymidine
  modified_base 7: mod_base = OTHER; note = 2'-O-methoxyethyl-5'-methylcytidine
  modified_base 8: mod_base = OTHER; note = 2'-O-methoxyethyl-5'-methylcytidine
  modified_base 9: mod_base = OTHER; note = 2'-O-methoxyethyl-thymidine
  modified_base 10: mod_base = OTHER; note = 2'-O-methoxyethyl-5'-methylcytidine
  modified_base 11: mod_base = OTHER; note = 2'-O-methoxyethyl-adenosine
  modified_base 12: mod_base = OTHER; note = 2'-O-methoxyethyl-5'-methylcytidine
  modified_base 13: mod_base = OTHER; note = 2'-O-methoxyethyl-adenosine
  modified_base 14: mod_base = OTHER; note = 2'-O-methoxyethyl-adenosine
  modified_base 15: mod_base = OTHER; note = 2'-O-methoxyethyl-adenosine
  modified_base 16: mod_base = OTHER; note = 2'-O-methoxyethyl-adenosine
  modified_base 17: mod_base = OTHER; note = 2'-O-methoxyethyl-5'-methylcytidine
  modified_base 18: mod_base = OTHER; note = 2'-O-methoxyethyl-5'-methylcytidine
ctagctcctcacaaaacc

SEQ ID NO: 319 - RNA, 18 nt, synthetic construct
  source 1..18: mol_type = other RNA
  modified_base 1: mod_base = OTHER; note = 2'-O-methoxyethyl-5'-methylcytidine
  modified_base 2: mod_base = OTHER; note = 2'-O-methoxyethyl-thymidine
  modified_base 3: mod_base = OTHER; note = 2'-O-methoxyethyl-thymidine
  modified_base 4: mod_base = OTHER; note = 2'-O-methoxyethyl-thymidine
  modified_base 5: mod_base = OTHER; note = 2'-O-methoxyethyl-adenosine
  modified_base 6: mod_base = OTHER; note = 2'-O-methoxyethyl-5'-methylcytidine
  modified_base 7: mod_base = OTHER; note = 2'-O-methoxyethyl-thymidine
  modified_base 8: mod_base = OTHER; note = 2'-O-methoxyethyl-adenosine
  modified_base 9: mod_base = OTHER; note = 2'-O-methoxyethyl-guanosine
  modified_base 10: mod_base = OTHER; note = 2'-O-methoxyethyl-5'-methylcytidine
  modified_base 11: mod_base = OTHER; note = 2'-O-methoxyethyl-thymidine
  modified_base 12: mod_base = OTHER; note = 2'-O-methoxyethyl-5'-methylcytidine
  modified_base 13: mod_base = OTHER; note = 2'-O-methoxyethyl-5'-methylcytidine
  modified_base 14: mod_base = OTHER; note = 2'-O-methoxyethyl-thymidine
  modified_base 15: mod_base = OTHER; note = 2'-O-methoxyethyl-5'-methylcytidine
  modified_base 16: mod_base = OTHER; note = 2'-O-methoxyethyl-adenosine
  modified_base 17: mod_base = OTHER; note = 2'-O-methoxyethyl-5'-methylcytidine
  modified_base 18: mod_base = OTHER; note = 2'-O-methoxyethyl-adenosine
ctttactagctcctcaca

SEQ ID NO: 320 - RNA, 18 nt, synthetic construct
  source 1..18: mol_type = other RNA
  modified_base 1: mod_base = OTHER; note = 2'-O-methoxyethyl-adenosine
  modified_base 2: mod_base = OTHER; note = 2'-O-methoxyethyl-adenosine
  modified_base 3: mod_base = OTHER; note = 2'-O-methoxyethyl-adenosine
  modified_base 4: mod_base = OTHER; note = 2'-O-methoxyethyl-adenosine
  modified_base 5: mod_base = OTHER; note = 2'-O-methoxyethyl-5'-methylcytidine
  modified_base 6: mod_base = OTHER; note = 2'-O-methoxyethyl-5'-methylcytidine
  modified_base 7: mod_base = OTHER; note = 2'-O-methoxyethyl-thymidine
  modified_base 8: mod_base = OTHER; note = 2'-O-methoxyethyl-thymidine
  modified_base 9: mod_base = OTHER; note = 2'-O-methoxyethyl-thymidine
  modified_base 10: mod_base = OTHER; note = 2'-O-methoxyethyl-adenosine
  modified_base 11: mod_base = OTHER; note = 2'-O-methoxyethyl-5'-methylcytidine
  modified_base 12: mod_base = OTHER; note = 2'-O-methoxyethyl-thymidine
  modified_base 13: mod_base = OTHER; note = 2'-O-methoxyethyl-adenosine
  modified_base 14: mod_base = OTHER; note = 2'-O-methoxyethyl-guanosine
  modified_base 15: mod_base = OTHER; note = 2'-O-methoxyethyl-5'-methylcytidine
  modified_base 16: mod_base = OTHER; note = 2'-O-methoxyethyl-thymidine
  modified_base 17: mod_base = OTHER; note = 2'-O-methoxyethyl-5'-methylcytidine
  modified_base 18: mod_base = OTHER; note = 2'-O-methoxyethyl-5'-methylcytidine
aaaacctttactagctcc

SEQ ID NO: 321 - RNA, 18 nt, synthetic construct
  source 1..18: mol_type = other RNA
  modified_base 1: mod_base = OTHER; note = 2'-O-methoxyethyl-adenosine
  modified_base 2: mod_base = OTHER; note = 2'-O-methoxyethyl-guanosine
  modified_base 3: mod_base = OTHER; note = 2'-O-methoxyethyl-adenosine
  modified_base 4: mod_base = OTHER; note = 2'-O-methoxyethyl-guanosine
  modified_base 5: mod_base = OTHER; note = 2'-O-methoxyethyl-adenosine
  modified_base 6: mod_base = OTHER; note = 2'-O-methoxyethyl-adenosine
  modified_base 7: mod_base = OTHER; note = 2'-O-methoxyethyl-adenosine
  modified_base 8: mod_base = OTHER; note = 2'-O-methoxyethyl-adenosine
  modified_base 9: mod_base = OTHER; note = 2'-O-methoxyethyl-adenosine
  modified_base 10: mod_base = OTHER; note = 2'-O-methoxyethyl-5'-methylcytidine
  modified_base 11: mod_base = OTHER; note = 2'-O-methoxyethyl-5'-methylcytidine
  modified_base 12: mod_base = OTHER; note = 2'-O-methoxyethyl-thymidine
  modified_base 13: mod_base = OTHER; note = 2'-O-methoxyethyl-thymidine
  modified_base 14: mod_base = OTHER; note = 2'-O-methoxyethyl-thymidine
  modified_base 15: mod_base = OTHER; note = 2'-O-methoxyethyl-adenosine
  modified_base 16: mod_base = OTHER; note = 2'-O-methoxyethyl-5'-methylcytidine
  modified_base 17: mod_base = OTHER; note = 2'-O-methoxyethyl-thymidine
  modified_base 18: mod_base = OTHER; note = 2'-O-methoxyethyl-adenosine
agagaaaaacctttacta

SEQ ID NO: 322 - RNA, 18 nt, synthetic construct
  source 1..18: mol_type = other RNA
  modified_base 1: mod_base = OTHER; note = 2'-O-methoxyethyl-5'-methylcytidine
  modified_base 2: mod_base = OTHER; note = 2'-O-methoxyethyl-thymidine
  modified_base 3: mod_base = OTHER; note = 2'-O-methoxyethyl-guanosine
  modified_base 4: mod_base = OTHER; note = 2'-O-methoxyethyl-adenosine
  modified_base 5: mod_base = OTHER; note = 2'-O-methoxyethyl-adenosine
  modified_base 6: mod_base = OTHER; note = 2'-O-methoxyethyl-adenosine
  modified_base 7: mod_base = OTHER; note = 2'-O-methoxyethyl-guanosine
  modified_base 8: mod_base = OTHER; note = 2'-O-methoxyethyl-adenosine
  modified_base 9: mod_base = OTHER; note = 2'-O-methoxyethyl-guanosine
  modified_base 10: mod_base = OTHER; note = 2'-O-methoxyethyl-adenosine
  modified_base 11: mod_base = OTHER; note = 2'-O-methoxyethyl-adenosine
  modified_base 12: mod_base = OTHER; note = 2'-O-methoxyethyl-adenosine
  modified_base 13: mod_base = OTHER; note = 2'-O-methoxyethyl-adenosine
  modified_base 14: mod_base = OTHER; note = 2'-O-methoxyethyl-adenosine
  modified_base 15: mod_base = OTHER; note = 2'-O-methoxyethyl-5'-methylcytidine
  modified_base 16: mod_base = OTHER; note = 2'-O-methoxyethyl-5'-methylcytidine
  modified_base 17: mod_base = OTHER; note = 2'-O-methoxyethyl-thymidine
  modified_base 18: mod_base = OTHER; note = 2'-O-methoxyethyl-thymidine
ctgaaagagaaaaacctt

SEQ ID NO: 323 - RNA, 18 nt, synthetic construct
  source 1..18: mol_type = other RNA
  modified_base 1: mod_base = OTHER; note = 2'-O-methoxyethyl-adenosine
  modified_base 2: mod_base = OTHER; note = 2'-O-methoxyethyl-adenosine
  modified_base 3: mod_base = OTHER; note = 2'-O-methoxyethyl-guanosine
  modified_base 4: mod_base = OTHER; note = 2'-O-methoxyethyl-5'-methylcytidine
  modified_base 5: mod_base = OTHER; note = 2'-O-methoxyethyl-thymidine
  modified_base 6: mod_base = OTHER; note = 2'-O-methoxyethyl-guanosine
  modified_base 7: mod_base = OTHER; note = 2'-O-methoxyethyl-adenosine
  modified_base 8: mod_base = OTHER; note = 2'-O-methoxyethyl-adenosine
  modified_base 9: mod_base = OTHER; note = 2'-O-methoxyethyl-adenosine
  modified_base 10: mod_base = OTHER; note = 2'-O-methoxyethyl-guanosine
  modified_base 11: mod_base = OTHER; note = 2'-O-methoxyethyl-adenosine
  modified_base 12: mod_base = OTHER; note = 2'-O-methoxyethyl-guanosine
  modified_base 13: mod_base = OTHER; note = 2'-O-methoxyethyl-adenosine
  modified_base 14: mod_base = OTHER; note = 2'-O-methoxyethyl-adenosine
  modified_base 15: mod_base = OTHER; note = 2'-O-methoxyethyl-adenosine
  modified_base 16: mod_base = OTHER; note = 2'-O-methoxyethyl-adenosine
  modified_base 17: mod_base = OTHER; note = 2'-O-methoxyethyl-adenosine
  modified_base 18: mod_base = OTHER; note = 2'-O-methoxyethyl-5'-methylcytidine
aagctgaaagagaaaaac

SEQ ID NO: 324 - RNA, 18 nt, synthetic construct
  source 1..18: mol_type = other RNA
  modified_base 1: mod_base = OTHER; note = 2'-O-methoxyethyl-5'-methylcytidine
  modified_base 2: mod_base = OTHER; note = 2'-O-methoxyethyl-thymidine
  modified_base 3: mod_base = OTHER; note = 2'-O-methoxyethyl-adenosine
  modified_base 4: mod_base = OTHER; note = 2'-O-methoxyethyl-adenosine
  modified_base 5: mod_base = OTHER; note = 2'-O-methoxyethyl-adenosine
  modified_base 6: mod_base = OTHER; note = 2'-O-methoxyethyl-guanosine
  modified_base 7: mod_base = OTHER; note = 2'-O-methoxyethyl-5'-methylcytidine
  modified_base 8: mod_base = OTHER; note = 2'-O-methoxyethyl-thymidine
  modified_base 9: mod_base = OTHER; note = 2'-O-methoxyethyl-guanosine
  modified_base 10: mod_base = OTHER; note = 2'-O-methoxyethyl-adenosine
  modified_base 11: mod_base = OTHER; note = 2'-O-methoxyethyl-adenosine
  modified_base 12: mod_base = OTHER; note = 2'-O-methoxyethyl-adenosine
  modified_base 13: mod_base = OTHER; note = 2'-O-methoxyethyl-guanosine
  modified_base 14: mod_base = OTHER; note = 2'-O-methoxyethyl-adenosine
  modified_base 15: mod_base = OTHER; note = 2'-O-methoxyethyl-guanosine
  modified_base 16: mod_base = OTHER; note = 2'-O-methoxyethyl-adenosine
  modified_base 17: mod_base = OTHER; note = 2'-O-methoxyethyl-adenosine
  modified_base 18: mod_base = OTHER; note = 2'-O-methoxyethyl-adenosine
ctaaagctgaaagagaaa

SEQ ID NO: 325 - RNA, 18 nt, synthetic construct
  source 1..18: mol_type = other RNA
  modified_base 1: mod_base = OTHER; note = 2'-O-methoxyethyl-adenosine
  modified_base 2: mod_base = OTHER; note = 2'-O-methoxyethyl-adenosine
  modified_base 3: mod_base = OTHER; note = 2'-O-methoxyethyl-guanosine
  modified_base 4: mod_base = OTHER; note = 2'-O-methoxyethyl-5'-methylcytidine
  modified_base 5: mod_base = OTHER; note = 2'-O-methoxyethyl-thymidine
  modified_base 6: mod_base = OTHER; note = 2'-O-methoxyethyl-adenosine
  modified_base 7: mod_base = OTHER; note = 2'-O-methoxyethyl-adenosine
  modified_base 8: mod_base = OTHER; note = 2'-O-methoxyethyl-adenosine
  modified_base 9: mod_base = OTHER; note = 2'-O-methoxyethyl-guanosine
  modified_base 10: mod_base = OTHER; note = 2'-O-methoxyethyl-5'-methylcytidine
  modified_base 11: mod_base = OTHER; note = 2'-O-methoxyethyl-thymidine
  modified_base 12: mod_base = OTHER; note = 2'-O-methoxyethyl-guanosine
  modified_base 13: mod_base = OTHER; note = 2'-O-methoxyethyl-adenosine
  modified_base 14: mod_base = OTHER; note = 2'-O-methoxyethyl-adenosine
  modified_base 15: mod_base = OTHER; note = 2'-O-methoxyethyl-adenosine
  modified_base 16: mod_base = OTHER; note = 2'-O-methoxyethyl-guanosine
  modified_base 17: mod_base = OTHER; note = 2'-O-methoxyethyl-adenosine
  modified_base 18: mod_base = OTHER; note = 2'-O-methoxyethyl-guanosine
aagctaaagctgaaagag

SEQ ID NO: 326 - RNA, 18 nt, synthetic construct
  source 1..18: mol_type = other RNA
  modified_base 1: mod_base = OTHER; note = 2'-O-methoxyethyl-adenosine
  modified_base 2: mod_base = OTHER; note = 2'-O-methoxyethyl-adenosine
  modified_base 3: mod_base = OTHER; note = 2'-O-methoxyethyl-5'-methylcytidine
  modified_base 4: mod_base = OTHER; note = 2'-O-methoxyethyl-adenosine
  modified_base 5: mod_base = OTHER; note = 2'-O-methoxyethyl-adenosine
  modified_base 6: mod_base = OTHER; note = 2'-O-methoxyethyl-guanosine
  modified_base 7: mod_base = OTHER; note = 2'-O-methoxyethyl-5'-methylcytidine
  modified_base 8: mod_base = OTHER; note = 2'-O-methoxyethyl-thymidine
  modified_base 9: mod_base = OTHER; note = 2'-O-methoxyethyl-adenosine
  modified_base 10: mod_base = OTHER; note = 2'-O-methoxyethyl-adenosine
  modified_base 11: mod_base = OTHER; note = 2'-O-methoxyethyl-adenosine
  modified_base 12: mod_base = OTHER; note = 2'-O-methoxyethyl-guanosine
  modified_base 13: mod_base = OTHER; note = 2'-O-methoxyethyl-5'-methylcytidine
  modified_base 14: mod_base = OTHER; note = 2'-O-methoxyethyl-thymidine
  modified_base 15: mod_base = OTHER; note = 2'-O-methoxyethyl-guanosine
  modified_base 16: mod_base = OTHER; note = 2'-O-methoxyethyl-adenosine
  modified_base 17: mod_base = OTHER; note = 2'-O-methoxyethyl-adenosine
  modified_base 18: mod_base = OTHER; note = 2'-O-methoxyethyl-adenosine
aacaagctaaagctgaaa

SEQ ID NO: 327 - RNA, 18 nt, synthetic construct
  source 1..18: mol_type = other RNA
  modified_base 1: mod_base = OTHER; note = 2'-O-methoxyethyl-adenosine
  modified_base 2: mod_base = OTHER; note = 2'-O-methoxyethyl-guanosine
  modified_base 3: mod_base = OTHER; note = 2'-O-methoxyethyl-adenosine
  modified_base 4: mod_base = OTHER; note = 2'-O-methoxyethyl-adenosine
  modified_base 5: mod_base = OTHER; note = 2'-O-methoxyethyl-adenosine
  modified_base 6: mod_base = OTHER; note = 2'-O-methoxyethyl-5'-methylcytidine
  modified_base 7: mod_base = OTHER; note = 2'-O-methoxyethyl-adenosine
  modified_base 8: mod_base = OTHER; note = 2'-O-methoxyethyl-adenosine
  modified_base 9: mod_base = OTHER; note = 2'-O-methoxyethyl-guanosine
  modified_base 10: mod_base = OTHER; note = 2'-O-methoxyethyl-5'-methylcytidine
  modified_base 11: mod_base = OTHER; note = 2'-O-methoxyethyl-thymidine
  modified_base 12: mod_base = OTHER; note = 2'-O-methoxyethyl-adenosine
  modified_base 13: mod_base = OTHER; note = 2'-O-methoxyethyl-adenosine
  modified_base 14: mod_base = OTHER; note = 2'-O-methoxyethyl-adenosine
  modified_base 15: mod_base = OTHER; note = 2'-O-methoxyethyl-guanosine
  modified_base 16: mod_base = OTHER; note = 2'-O-methoxyethyl-5'-methylcytidine
  modified_base 17: mod_base = OTHER; note = 2'-O-methoxyethyl-thymidine
  modified_base 18: mod_base = OTHER; note = 2'-O-methoxyethyl-guanosine
agaaacaagctaaagctg

SEQ ID NO: 328 - RNA, 18 nt, synthetic construct
  source 1..18: mol_type = other RNA
  modified_base 1: mod_base = OTHER; note = 2'-O-methoxyethyl-5'-methylcytidine
  modified_base 2: mod_base = OTHER; note = 2'-O-methoxyethyl-guanosine
  modified_base 3: mod_base = OTHER; note = 2'-O-methoxyethyl-5'-methylcytidine
  modified_base 4: mod_base = OTHER; note = 2'-O-methoxyethyl-adenosine
  modified_base 5: mod_base = OTHER; note = 2'-O-methoxyethyl-guanosine
  modified_base 6: mod_base = OTHER; note = 2'-O-methoxyethyl-adenosine
  modified_base 7: mod_base = OTHER; note = 2'-O-methoxyethyl-adenosine
  modified_base 8: mod_base = OTHER; note = 2'-O-methoxyethyl-adenosine
  modified_base 9: mod_base = OTHER; note = 2'-O-methoxyethyl-5'-methylcytidine
  modified_base 10: mod_base = OTHER; note = 2'-O-methoxyethyl-adenosine
  modified_base 11: mod_base = OTHER; note = 2'-O-methoxyethyl-adenosine
  modified_base 12: mod_base = OTHER; note = 2'-O-methoxyethyl-guanosine
  modified_base 13: mod_base = OTHER; note = 2'-O-methoxyethyl-5'-methylcytidine
  modified_base 14: mod_base = OTHER; note = 2'-O-methoxyethyl-thymidine
  modified_base 15: mod_base = OTHER; note = 2'-O-methoxyethyl-adenosine
  modified_base 16: mod_base = OTHER; note = 2'-O-methoxyethyl-adenosine
  modified_base 17: mod_base = OTHER; note = 2'-O-methoxyethyl-adenosine
  modified_base 18: mod_base = OTHER; note = 2'-O-methoxyethyl-guanosine
cgcagaaacaagctaaag

SEQ ID NO: 329 - RNA, 18 nt, synthetic construct
  source 1..18: mol_type = other RNA
  modified_base 1: mod_base = OTHER; note = 2'-O-methoxyethyl-thymidine
  modified_base 2: mod_base = OTHER; note = 2'-O-methoxyethyl-5'-methylcytidine
  modified_base 3: mod_base = OTHER; note = 2'-O-methoxyethyl-5'-methylcytidine
  modified_base 4: mod_base = OTHER; note = 2'-O-methoxyethyl-thymidine
  modified_base 5: mod_base = OTHER; note = 2'-O-methoxyethyl-5'-methylcytidine
  modified_base 6: mod_base = OTHER; note = 2'-O-methoxyethyl-5'-methylcytidine
  modified_base 7: mod_base = OTHER; note = 2'-O-methoxyethyl-guanosine
  modified_base 8: mod_base = OTHER; note = 2'-O-methoxyethyl-5'-methylcytidine
  modified_base 9: mod_base = OTHER; note = 2'-O-methoxyethyl-adenosine
  modified_base 10: mod_base = OTHER; note = 2'-O-methoxyethyl-guanosine
  modified_base 11: mod_base = OTHER; note = 2'-O-methoxyethyl-adenosine
  modified_base 12: mod_base = OTHER; note = 2'-O-methoxyethyl-adenosine
  modified_base 13: mod_base = OTHER; note = 2'-O-methoxyethyl-adenosine
  modified_base 14: mod_base = OTHER; note = 2'-O-methoxyethyl-5'-methylcytidine
  modified_base 15: mod_base = OTHER; note = 2'-O-methoxyethyl-adenosine
  modified_base 16: mod_base = OTHER; note = 2'-O-methoxyethyl-adenosine
  modified_base 17: mod_base = OTHER; note = 2'-O-methoxyethyl-guanosine
  modified_base 18: mod_base = OTHER; note = 2'-O-methoxyethyl-5'-methylcytidine
tcctccgcagaaacaagc

SEQ ID NO: 330 - RNA, 18 nt, synthetic construct
  source 1..18: mol_type = other RNA
  modified_base 1: mod_base = OTHER; note = 2'-O-methoxyethyl-5'-methylcytidine
  modified_base 2: mod_base = OTHER; note = 2'-O-methoxyethyl-guanosine
  modified_base 3: mod_base = OTHER; note = 2'-O-methoxyethyl-guanosine
  modified_base 4: mod_base = OTHER; note = 2'-O-methoxyethyl-adenosine
  modified_base 5: mod_base = OTHER; note = 2'-O-methoxyethyl-adenosine
  modified_base 6: mod_base = OTHER; note = 2'-O-methoxyethyl-thymidine
  modified_base 7: mod_base = OTHER; note = 2'-O-methoxyethyl-5'-methylcytidine
  modified_base 8: mod_base = OTHER; note = 2'-O-methoxyethyl-5'-methylcytidine
  modified_base 9: mod_base = OTHER; note = 2'-O-methoxyethyl-thymidine
  modified_base 10: mod_base = OTHER; note = 2'-O-methoxyethyl-5'-methylcytidine
  modified_base 11: mod_base = OTHER; note = 2'-O-methoxyethyl-5'-methylcytidine
  modified_base 12: mod_base = OTHER; note = 2'-O-methoxyethyl-guanosine
  modified_base 13: mod_base = OTHER; note = 2'-O-methoxyethyl-5'-methylcytidine
  modified_base 14: mod_base = OTHER; note = 2'-O-methoxyethyl-adenosine
  modified_base 15: mod_base = OTHER; note = 2'-O-methoxyethyl-guanosine
  modified_base 16: mod_base = OTHER; note = 2'-O-methoxyethyl-adenosine
  modified_base 17: mod_base = OTHER; note = 2'-O-methoxyethyl-adenosine
  modified_base 18: mod_base = OTHER; note = 2'-O-methoxyethyl-adenosine
cggaatcctccgcagaaa

SEQ ID NO: 331 - RNA, 18 nt, synthetic construct
  source 1..18: mol_type = other RNA
  modified_base 1: mod_base = OTHER; note = 2'-O-methoxyethyl-adenosine
  modified_base 2: mod_base = OTHER; note = 2'-O-methoxyethyl-adenosine
  modified_base 3: mod_base = OTHER; note = 2'-O-methoxyethyl-guanosine
  modified_base 4: mod_base = OTHER; note = 2'-O-methoxyethyl-adenosine
  modified_base 5: mod_base = OTHER; note = 2'-O-methoxyethyl-guanosine
  modified_base 6: mod_base = OTHER; note = 2'-O-methoxyethyl-5'-methylcytidine
  modified_base 7: mod_base = OTHER; note = 2'-O-methoxyethyl-guanosine
  modified_base 8: mod_base = OTHER; note = 2'-O-methoxyethyl-guanosine
  modified_base 9: mod_base = OTHER; note = 2'-O-methoxyethyl-adenosine
  modified_base 10: mod_base = OTHER; note = 2'-O-methoxyethyl-adenosine
  modified_base 11: mod_base = OTHER; note = 2'-O-methoxyethyl-thymidine
  modified_base 12: mod_base = OTHER; note = 2'-O-methoxyethyl-5'-methylcytidine
  modified_base 13: mod_base = OTHER; note = 2'-O-methoxyethyl-5'-methylcytidine
  modified_base 14: mod_base = OTHER; note = 2'-O-methoxyethyl-thymidine
  modified_base 15: mod_base = OTHER; note = 2'-O-methoxyethyl-5'-methylcytidine
  modified_base 16: mod_base = OTHER; note = 2'-O-methoxyethyl-5'-methylcytidine
  modified_base 17: mod_base = OTHER; note = 2'-O-methoxyethyl-guanosine
  modified_base 18: mod_base = OTHER; note = 2'-O-methoxyethyl-5'-methylcytidine
aagagcggaatcctccgc

SEQ ID NO: 332 - RNA, 18 nt, synthetic construct
  source 1..18: mol_type = other RNA
  modified_base 1: mod_base = OTHER; note = 2'-O-methoxyethyl-guanosine
  modified_base 2: mod_base = OTHER; note = 2'-O-methoxyethyl-guanosine
  modified_base 3: mod_base = OTHER; note = 2'-O-methoxyethyl-adenosine
  modified_base 4: mod_base = OTHER; note = 2'-O-methoxyethyl-guanosine
  modified_base 5: mod_base = OTHER; note = 2'-O-methoxyethyl-adenosine
  modified_base 6: mod_base = OTHER; note = 2'-O-methoxyethyl-adenosine
  modified_base 7: mod_base = OTHER; note = 2'-O-methoxyethyl-adenosine
  modified_base 8: mod_base = OTHER; note = 2'-O-methoxyethyl-guanosine
  modified_base 9: mod_base = OTHER; note = 2'-O-methoxyethyl-adenosine
  modified_base 10: mod_base = OTHER; note = 2'-O-methoxyethyl-guanosine
  modified_base 11: mod_base = OTHER; note = 2'-O-methoxyethyl-5'-methylcytidine
  modified_base 12: mod_base = OTHER; note = 2'-O-methoxyethyl-guanosine
  modified_base 13: mod_base = OTHER; note = 2'-O-methoxyethyl-guanosine
  modified_base 14: mod_base = OTHER; note = 2'-O-methoxyethyl-adenosine
  modified_base 15: mod_base = OTHER; note = 2'-O-methoxyethyl-adenosine
  modified_base 16: mod_base = OTHER; note = 2'-O-methoxyethyl-thymidine
  modified_base 17: mod_base = OTHER; note = 2'-O-methoxyethyl-5'-methylcytidine
  modified_base 18: mod_base = OTHER; note = 2'-O-methoxyethyl-5'-methylcytidine
ggagaaagagcggaatcc

SEQ ID NO: 333 - RNA, 18 nt, synthetic construct
  source 1..18: mol_type = other RNA
  modified_base 1: mod_base = OTHER; note = 2'-O-methoxyethyl-5'-methylcytidine
  modified_base 2: mod_base = OTHER; note = 2'-O-methoxyethyl-thymidine
  modified_base 3: mod_base = OTHER; note = 2'-O-methoxyethyl-guanosine
  modified_base 4: mod_base = OTHER; note = 2'-O-methoxyethyl-adenosine
  modified_base 5: mod_base = OTHER; note = 2'-O-methoxyethyl-thymidine
  modified_base 6: mod_base = OTHER; note = 2'-O-methoxyethyl-guanosine
  modified_base 7: mod_base = OTHER; note = 2'-O-methoxyethyl-guanosine
  modified_base 8: mod_base = OTHER; note = 2'-O-methoxyethyl-adenosine
  modified_base 9: mod_base = OTHER; note = 2'-O-methoxyethyl-guanosine
  modified_base 10: mod_base = OTHER; note = 2'-O-methoxyethyl-adenosine
  modified_base 11: mod_base = OTHER; note = 2'-O-methoxyethyl-adenosine
  modified_base 12: mod_base = OTHER; note = 2'-O-methoxyethyl-adenosine
  modified_base 13: mod_base = OTHER; note = 2'-O-methoxyethyl-guanosine
  modified_base 14: mod_base = OTHER; note = 2'-O-methoxyethyl-adenosine
  modified_base 15: mod_base = OTHER; note = 2'-O-methoxyethyl-guanosine
  modified_base 16: mod_base = OTHER; note = 2'-O-methoxyethyl-5'-methylcytidine
  modified_base 17: mod_base = OTHER; note = 2'-O-methoxyethyl-guanosine
  modified_base 18: mod_base = OTHER; note = 2'-O-methoxyethyl-guanosine
ctgatggagaaagagcgg

SEQ ID NO: 334 - RNA, 18 nt, synthetic construct
  source 1..18: mol_type = other RNA
  modified_base 1: mod_base = OTHER; note = 2'-O-methoxyethyl-thymidine
  modified_base 2: mod_base = OTHER; note = 2'-O-methoxyethyl-guanosine
  modified_base 3: mod_base = OTHER; note = 2'-O-methoxyethyl-adenosine
  modified_base 4: mod_base = OTHER; note = 2'-O-methoxyethyl-adenosine
  modified_base 5: mod_base = OTHER; note = 2'-O-methoxyethyl-adenosine
  modified_base 6: mod_base = OTHER; note = 2'-O-methoxyethyl-5'-methylcytidine
  modified_base 7: mod_base = OTHER; note = 2'-O-methoxyethyl-thymidine
  modified_base 8: mod_base = OTHER; note = 2'-O-methoxyethyl-guanosine
  modified_base 9: mod_base = OTHER; note = 2'-O-methoxyethyl-adenosine
  modified_base 10: mod_base = OTHER; note = 2'-O-methoxyethyl-thymidine
  modified_base 11: mod_base = OTHER; note = 2'-O-methoxyethyl-guanosine
  modified_base 12: mod_base = OTHER; note = 2'-O-methoxyethyl-guanosine
  modified_base 13: mod_base = OTHER; note = 2'-O-methoxyethyl-adenosine
  modified_base 14: mod_base = OTHER; note = 2'-O-methoxyethyl-guanosine
  modified_base 15: mod_base = OTHER; note = 2'-O-methoxyethyl-adenosine
  modified_base 16: mod_base = OTHER; note = 2'-O-methoxyethyl-adenosine
  modified_base 17: mod_base = OTHER; note = 2'-O-methoxyethyl-adenosine
  modified_base 18: mod_base = OTHER; note = 2'-O-methoxyethyl-guanosine
tgaaactgatggagaaag

SEQ ID NO: 335 - RNA, 18 nt, synthetic construct
  source 1..18: mol_type = other RNA
  modified_base 1: mod_base = OTHER; note = 2'-O-methoxyethyl-guanosine
  modified_base 2: mod_base = OTHER; note = 2'-O-methoxyethyl-guanosine
  modified_base 3: mod_base = OTHER; note = 2'-O-methoxyethyl-5'-methylcytidine
  modified_base 4: mod_base = OTHER; note = 2'-O-methoxyethyl-thymidine
  modified_base 5: mod_base = OTHER; note = 2'-O-methoxyethyl-adenosine
  modified_base 6: mod_base = OTHER; note = 2'-O-methoxyethyl-thymidine
  modified_base 7: mod_base = OTHER; note = 2'-O-methoxyethyl-guanosine
  modified_base 8: mod_base = OTHER; note = 2'-O-methoxyethyl-adenosine
  modified_base 9: mod_base = OTHER; note = 2'-O-methoxyethyl-adenosine
  modified_base 10: mod_base = OTHER; note = 2'-O-methoxyethyl-adenosine
  modified_base 11: mod_base = OTHER; note = 2'-O-methoxyethyl-5'-methylcytidine
  modified_base 12: mod_base = OTHER; note = 2'-O-methoxyethyl-thymidine
  modified_base 13: mod_base = OTHER; note = 2'-O-methoxyethyl-guanosine
  modified_base 14: mod_base = OTHER; note = 2'-O-methoxyethyl-adenosine
  modified_base 15: mod_base = OTHER; note = 2'-O-methoxyethyl-thymidine
  modified_base 16: mod_base = OTHER; note = 2'-O-methoxyethyl-guanosine
  modified_base 17: mod_base = OTHER; note = 2'-O-methoxyethyl-guanosine
  modified_base 18: mod_base = OTHER; note = 2'-O-methoxyethyl-adenosine
ggctatgaaactgatgga

SEQ ID NO: 336 - RNA, 18 nt, synthetic construct
  source 1..18: mol_type = other RNA
  modified_base 1: mod_base = OTHER; note = 2'-O-methoxyethyl-thymidine
  modified_base 2: mod_base = OTHER; note = 2'-O-methoxyethyl-5'-methylcytidine
  modified_base 3: mod_base = OTHER; note = 2'-O-methoxyethyl-5'-methylcytidine
  modified_base 4: mod_base = OTHER; note = 2'-O-methoxyethyl-adenosine
  modified_base 5: mod_base = OTHER; note = 2'-O-methoxyethyl-guanosine
  modified_base 6: mod_base = OTHER; note = 2'-O-methoxyethyl-guanosine
  modified_base 7: mod_base = OTHER; note = 2'-O-methoxyethyl-guanosine
  modified_base 8: mod_base = OTHER; note = 2'-O-methoxyethyl-5'-methylcytidine
  modified_base 9: mod_base = OTHER; note = 2'-O-methoxyethyl-thymidine
  modified_base 10: mod_base = OTHER; note = 2'-O-methoxyethyl-adenosine
  modified_base 11: mod_base = OTHER; note = 2'-O-methoxyethyl-thymidine
  modified_base 12: mod_base = OTHER; note = 2'-O-methoxyethyl-guanosine
  modified_base 13: mod_base = OTHER; note = 2'-O-methoxyethyl-adenosine
  modified_base 14: mod_base = OTHER; note = 2'-O-methoxyethyl-adenosine
  modified_base 15: mod_base = OTHER; note = 2'-O-methoxyethyl-adenosine
  modified_base 16: mod_base = OTHER; note = 2'-O-methoxyethyl-5'-methylcytidine
  modified_base 17: mod_base = OTHER; note = 2'-O-methoxyethyl-thymidine
  modified_base 18: mod_base = OTHER; note = 2'-O-methoxyethyl-guanosine
tccagggctatgaaactg

SEQ ID NO: 337 - RNA, 18 nt, synthetic construct
  source 1..18: mol_type = other RNA
  modified_base 1: mod_base = OTHER; note = 2'-O-methoxyethyl-adenosine
  modified_base 2: mod_base = OTHER; note = 2'-O-methoxyethyl-5'-methylcytidine
  modified_base 3: mod_base = OTHER; note = 2'-O-methoxyethyl-adenosine
  modified_base 4: mod_base = OTHER; note = 2'-O-methoxyethyl-adenosine
  modified_base 5: mod_base = OTHER; note = 2'-O-methoxyethyl-thymidine
  modified_base 6: mod_base = OTHER; note = 2'-O-methoxyethyl-thymidine
  modified_base 7: mod_base = OTHER; note = 2'-O-methoxyethyl-5'-methylcytidine
  modified_base 8: mod_base = OTHER; note = 2'-O-methoxyethyl-5'-methylcytidine
  modified_base 9: mod_base = OTHER; note = 2'-O-methoxyethyl-adenosine
  modified_base 10: mod_base = OTHER; note = 2'-O-methoxyethyl-guanosine
  modified_base 11: mod_base = OTHER; note = 2'-O-methoxyethyl-guanosine
  modified_base 12: mod_base = OTHER; note = 2'-O-methoxyethyl-guanosine
  modified_base 13: mod_base = OTHER; note = 2'-O-methoxyethyl-5'-methylcytidine
  modified_base 14: mod_base = OTHER; note = 2'-O-methoxyethyl-thymidine
  modified_base 15: mod_base = OTHER; note = 2'-O-methoxyethyl-adenosine
  modified_base 16: mod_base = OTHER; note = 2'-O-methoxyethyl-thymidine
  modified_base 17: mod_base = OTHER; note = 2'-O-methoxyethyl-guanosine
  modified_base 18: mod_base = OTHER; note = 2'-O-methoxyethyl-adenosine
acaattccagggctatga

SEQ ID NO: 338 - RNA, 18 nt, synthetic construct
  source 1..18: mol_type = other RNA
  modified_base 1: mod_base = OTHER; note = 2'-O-methoxyethyl-thymidine
  modified_base 2: mod_base = OTHER; note = 2'-O-methoxyethyl-thymidine
  modified_base 3: mod_base = OTHER; note = 2'-O-methoxyethyl-thymidine
  modified_base 4: mod_base = OTHER; note = 2'-O-methoxyethyl-5'-methylcytidine
  modified_base 5: mod_base = OTHER; note = 2'-O-methoxyethyl-thymidine
  modified_base 6: mod_base = OTHER; note = 2'-O-methoxyethyl-adenosine
  modified_base 7: mod_base = OTHER; note = 2'-O-methoxyethyl-5'-methylcytidine
  modified_base 8: mod_base = OTHER; note = 2'-O-methoxyethyl-adenosine
  modified_base 9: mod_base = OTHER; note = 2'-O-methoxyethyl-adenosine
  modified_base 10: mod_base = OTHER; note = 2'-O-methoxyethyl-thymidine
  modified_base 11: mod_base = OTHER; note = 2'-O-methoxyethyl-thymidine
  modified_base 12: mod_base = OTHER; note = 2'-O-methoxyethyl-5'-methylcytidine
  modified_base 13: mod_base = OTHER; note = 2'-O-methoxyethyl-5'-methylcytidine
  modified_base 14: mod_base = OTHER; note = 2'-O-methoxyethyl-adenosine
  modified_base 15: mod_base = OTHER; note = 2'-O-methoxyethyl-guanosine
  modified_base 16: mod_base = OTHER; note = 2'-O-methoxyethyl-guanosine
  modified_base 17: mod_base = OTHER; note = 2'-O-methoxyethyl-guanosine
  modified_base 18: mod_base = OTHER; note = 2'-O-methoxyethyl-5'-methylcytidine
tttctacaattccagggc

SEQ ID NO: 339 - RNA, 18 nt, synthetic construct
  source 1..18: mol_type = other RNA
  modified_base 1: mod_base = OTHER; note = 2'-O-methoxyethyl-guanosine
  modified_base 2: mod_base = OTHER; note = 2'-O-methoxyethyl-adenosine
  modified_base 3: mod_base = OTHER; note = 2'-O-methoxyethyl-guanosine
  modified_base 4: mod_base = OTHER; note = 2'-O-methoxyethyl-5'-methylcytidine
  modified_base 5: mod_base = OTHER; note = 2'-O-methoxyethyl-thymidine
  modified_base 6: mod_base = OTHER; note = 2'-O-methoxyethyl-thymidine
  modified_base 7: mod_base = OTHER; note = 2'-O-methoxyethyl-thymidine
  modified_base 8: mod_base = OTHER; note = 2'-O-methoxyethyl-thymidine
  modified_base 9: mod_base = OTHER; note = 2'-O-methoxyethyl-5'-methylcytidine
  modified_base 10: mod_base = OTHER; note = 2'-O-methoxyethyl-thymidine
  modified_base 11: mod_base = OTHER; note = 2'-O-methoxyethyl-adenosine
  modified_base 12: mod_base = OTHER; note = 2'-O-methoxyethyl-5'-methylcytidine
  modified_base 13: mod_base = OTHER; note = 2'-O-methoxyethyl-adenosine
  modified_base 14: mod_base = OTHER; note = 2'-O-methoxyethyl-adenosine
  modified_base 15: mod_base = OTHER; note = 2'-O-methoxyethyl-thymidine
  modified_base 16: mod_base = OTHER; note = 2'-O-methoxyethyl-thymidine
  modified_base 17: mod_base = OTHER; note = 2'-O-methoxyethyl-5'-methylcytidine
  modified_base 18: mod_base = OTHER; note = 2'-O-methoxyethyl-5'-methylcytidine
gagcttttctacaattcc

SEQ ID NO: 340 - RNA, 18 nt, synthetic construct
  source 1..18: mol_type = other RNA
  modified_base 1: mod_base = OTHER; note = 2'-O-methoxyethyl-adenosine
  modified_base 2: mod_base = OTHER; note = 2'-O-methoxyethyl-adenosine
  modified_base 3: mod_base = OTHER; note = 2'-O-methoxyethyl-5'-methylcytidine
  modified_base 4: mod_base = OTHER; note = 2'-O-methoxyethyl-5'-methylcytidine
  modified_base 5: mod_base = OTHER; note = 2'-O-methoxyethyl-adenosine
  modified_base 6: mod_base = OTHER; note = 2'-O-methoxyethyl-guanosine
  modified_base 7: mod_base = OTHER; note = 2'-O-methoxyethyl-adenosine
  modified_base 8: mod_base = OTHER; note = 2'-O-methoxyethyl-guanosine
  modified_base 9: mod_base = OTHER; note = 2'-O-methoxyethyl-5'-methylcytidine
  modified_base 10: mod_base = OTHER; note = 2'-O-methoxyethyl-thymidine
  modified_base 11: mod_base = OTHER; note = 2'-O-methoxyethyl-thymidine
  modified_base 12: mod_base = OTHER; note = 2'-O-methoxyethyl-thymidine
  modified_base 13: mod_base = OTHER; note = 2'-O-methoxyethyl-thymidine
  modified_base 14: mod_base = OTHER; note = 2'-O-methoxyethyl-5'-methylcytidine
  modified_base 15: mod_base = OTHER; note = 2'-O-methoxyethyl-thymidine
  modified_base 16: mod_base = OTHER; note = 2'-O-methoxyethyl-adenosine
  modified_base 17: mod_base = OTHER; note = 2'-O-methoxyethyl-5'-methylcytidine
  modified_base 18: mod_base = OTHER; note = 2'-O-methoxyethyl-adenosine
aaccagagcttttctaca

SEQ ID NO: 341 - RNA, 18 nt, synthetic construct
  source 1..18: mol_type = other RNA
  modified_base 1: mod_base = OTHER; note = 2'-O-methoxyethyl-5'-methylcytidine
  modified_base 2: mod_base = OTHER; note = 2'-O-methoxyethyl-thymidine
  modified_base 3: mod_base = OTHER; note = 2'-O-methoxyethyl-thymidine
  modified_base 4: mod_base = OTHER; note = 2'-O-methoxyethyl-guanosine
  modified_base 5: mod_base = OTHER; note = 2'-O-methoxyethyl-adenosine
  modified_base 6: mod_base = OTHER; note = 2'-O-methoxyethyl-adenosine
  modified_base 7: mod_base = OTHER; note = 2'-O-methoxyethyl-adenosine
  modified_base 8: mod_base = OTHER; note = 2'-O-methoxyethyl-5'-methylcytidine
  modified_base 9: mod_base = OTHER; note = 2'-O-methoxyethyl-5'-methylcytidine
  modified_base 10: mod_base = OTHER; note = 2'-O-methoxyethyl-adenosine
  modified_base 11: mod_base = OTHER; note = 2'-O-methoxyethyl-guanosine
  modified_base 12: mod_base = OTHER; note = 2'-O-methoxyethyl-adenosine
  modified_base 13: mod_base = OTHER; note = 2'-O-methoxyethyl-guanosine
  modified_base 14: mod_base = OTHER; note = 2'-O-methoxyethyl-5'-methylcytidine
  modified_base 15: mod_base = OTHER; note = 2'-O-methoxyethyl-thymidine
  modified_base 16: mod_base = OTHER; note = 2'-O-methoxyethyl-thymidine
  modified_base 17: mod_base = OTHER; note = 2'-O-methoxyethyl-thymidine
  modified_base 18: mod_base = OTHER; note = 2'-O-methoxyethyl-thymidine
cttgaaaccagagctttt

SEQ ID NO: 342 - RNA, 18 nt, synthetic construct
  source 1..18: mol_type = other RNA
  modified_base 1: mod_base = OTHER; note = 2'-O-methoxyethyl-adenosine
  modified_base 2: mod_base = OTHER; note = 2'-O-methoxyethyl-thymidine
  modified_base 3: mod_base = OTHER; note = 2'-O-methoxyethyl-guanosine
  modified_base 4: mod_base = OTHER; note = 2'-O-methoxyethyl-guanosine
  modified_base 5: mod_base = OTHER; note = 2'-O-methoxyethyl-thymidine
  modified_base 6: mod_base = OTHER; note = 2'-O-methoxyethyl-5'-methylcytidine
  modified_base 7: mod_base = OTHER; note = 2'-O-methoxyethyl-thymidine
  modified_base 8: mod_base = OTHER; note = 2'-O-methoxyethyl-thymidine
  modified_base 9: mod_base = OTHER; note = 2'-O-methoxyethyl-guanosine
  modified_base 10: mod_base = OTHER; note = 2'-O-methoxyethyl-adenosine
  modified_base 11: mod_base = OTHER; note = 2'-O-methoxyethyl-adenosine
  modified_base 12: mod_base = OTHER; note = 2'-O-methoxyethyl-adenosine
  modified_base 13: mod_base = OTHER; note = 2'-O-methoxyethyl-5'-methylcytidine
  modified_base 14: mod_base = OTHER; note = 2'-O-methoxyethyl-5'-methylcytidine
  modified_base 15: mod_base = OTHER; note = 2'-O-methoxyethyl-adenosine
  modified_base 16: mod_base = OTHER; note = 2'-O-methoxyethyl-guanosine
  modified_base 17: mod_base = OTHER; note = 2'-O-methoxyethyl-adenosine
  modified_base 18: mod_base = OTHER; note = 2'-O-methoxyethyl-guanosine
atggtcttgaaaccagag

SEQ ID NO: 343 - RNA, 18 nt, synthetic construct
  source 1..18: mol_type = other RNA
  modified_base 1: mod_base = OTHER; note = 2'-O-methoxyethyl-thymidine
  modified_base 2: mod_base = OTHER; note = 2'-O-methoxyethyl-adenosine
  modified_base 3: mod_base = OTHER; note = 2'-O-methoxyethyl-thymidine
  modified_base 4: mod_base = OTHER; note = 2'-O-methoxyethyl-5'-methylcytidine
  modified_base 5: mod_base = OTHER; note = 2'-O-methoxyethyl-adenosine
  modified_base 6: mod_base = OTHER; note = 2'-O-methoxyethyl-adenosine
  modified_base 7: mod_base = OTHER; note = 2'-O-methoxyethyl-thymidine
  modified_base 8: mod_base = OTHER; note = 2'-O-methoxyethyl-guanosine
  modified_base 9: mod_base = OTHER; note = 2'-O-methoxyethyl-guanosine
  modified_base 10: mod_base = OTHER; note = 2'-O-methoxyethyl-thymidine
  modified_base 11: mod_base = OTHER; note = 2'-O-methoxyethyl-5'-methylcytidine
  modified_base 12: mod_base = OTHER; note = 2'-O-methoxyethyl-thymidine
  modified_base 13: mod_base = OTHER; note = 2'-O-methoxyethyl-thymidine
  modified_base 14: mod_base = OTHER; note = 2'-O-methoxyethyl-guanosine
  modified_base 15: mod_base = OTHER; note = 2'-O-methoxyethyl-adenosine
  modified_base 16: mod_base = OTHER; note = 2'-O-methoxyethyl-adenosine
  modified_base 17: mod_base = OTHER; note = 2'-O-methoxyethyl-adenosine
  modified_base 18: mod_base = OTHER; note = 2'-O-methoxyethyl-5'-methylcytidine
tatcaatggtcttgaaac

SEQ ID NO: 344 - RNA, 18 nt, synthetic construct
  source 1..18: mol_type = other RNA
  modified_base 1: mod_base = OTHER; note = 2'-O-methoxyethyl-adenosine
  modified_base 2: mod_base = OTHER; note = 2'-O-methoxyethyl-thymidine
  modified_base 3: mod_base = OTHER; note = 2'-O-methoxyethyl-guanosine
  modified_base 4: mod_base = OTHER; note = 2'-O-methoxyethyl-guanosine
  modified_base 5: mod_base = OTHER; note = 2'-O-methoxyethyl-adenosine
  modified_base 6: mod_base = OTHER; note = 2'-O-methoxyethyl-thymidine
  modified_base 7: mod_base = OTHER; note = 2'-O-methoxyethyl-adenosine
  modified_base 8: mod_base = OTHER; note = 2'-O-methoxyethyl-thymidine
  modified_base 9: mod_base = OTHER; note = 2'-O-methoxyethyl-5'-methylcytidine
  modified_base 10: mod_base = OTHER; note = 2'-O-methoxyethyl-adenosine
  modified_base 11: mod_base = OTHER; note = 2'-O-methoxyethyl-adenosine
  modified_base 12: mod_base = OTHER; note = 2'-O-methoxyethyl-thymidine
  modified_base 13: mod_base = OTHER; note = 2'-O-methoxyethyl-guanosine
  modified_base 14: mod_base = OTHER; note = 2'-O-methoxyethyl-guanosine
  modified_base 15: mod_base = OTHER; note = 2'-O-methoxyethyl-thymidine
  modified_base 16: mod_base = OTHER; note = 2'-O-methoxyethyl-5'-methylcytidine
  modified_base 17: mod_base = OTHER; note = 2'-O-methoxyethyl-thymidine
  modified_base 18: mod_base = OTHER; note = 2'-O-methoxyethyl-thymidine
atggatatcaatggtctt

SEQ ID NO: 345 - RNA, 18 nt, synthetic construct
  source 1..18: mol_type = other RNA
  modified_base 1: mod_base = OTHER; note = 2'-O-methoxyethyl-5'-methylcytidine
  modified_base 2: mod_base = OTHER; note = 2'-O-methoxyethyl-adenosine
  modified_base 3: mod_base = OTHER; note = 2'-O-methoxyethyl-guanosine
  modified_base 4: mod_base = OTHER; note = 2'-O-methoxyethyl-adenosine
  modified_base 5: mod_base = OTHER; note = 2'-O-methoxyethyl-adenosine
  modified_base 6: mod_base = OTHER; note = 2'-O-methoxyethyl-adenosine
  modified_base 7: mod_base = OTHER; note = 2'-O-methoxyethyl-thymidine
  modified_base 8: mod_base = OTHER; note = 2'-O-methoxyethyl-guanosine
  modified_base 9: mod_base = OTHER; note = 2'-O-methoxyethyl-guanosine
  modified_base 10: mod_base = OTHER; note = 2'-O-methoxyethyl-adenosine
  modified_base 11: mod_base = OTHER; note = 2'-O-methoxyethyl-thymidine
  modified_base 12: mod_base = OTHER; note = 2'-O-methoxyethyl-adenosine
  modified_base 13: mod_base = OTHER; note = 2'-O-methoxyethyl-thymidine
  modified_base 14: mod_base = OTHER; note = 2'-O-methoxyethyl-5'-methylcytidine
  modified_base 15: mod_base = OTHER; note = 2'-O-methoxyethyl-adenosine
  modified_base 16: mod_base = OTHER; note = 2'-O-methoxyethyl-adenosine
  modified_base 17: mod_base = OTHER; note = 2'-O-methoxyethyl-thymidine
  modified_base 18: mod_base = OTHER; note = 2'-O-methoxyethyl-guanosine
cagaaatggatatcaatg

SEQ ID NO: 346 - RNA, 18 nt, synthetic construct
  source 1..18: mol_type = other RNA
  modified_base 1: mod_base = OTHER; note = 2'-O-methoxyethyl-5'-methylcytidine
  modified_base 2: mod_base = OTHER; note = 2'-O-methoxyethyl-5'-methylcytidine
  modified_base 3: mod_base = OTHER; note = 2'-O-methoxyethyl-thymidine
  modified_base 4: mod_base = OTHER; note = 2'-O-methoxyethyl-guanosine
  modified_base 5: mod_base = OTHER; note = 2'-O-methoxyethyl-adenosine
  modified_base 6: mod_base = OTHER; note = 2'-O-methoxyethyl-5'-methylcytidine
  modified_base 7: mod_base = OTHER; note = 2'-O-methoxyethyl-adenosine
  modified_base 8: mod_base = OTHER; note = 2'-O-methoxyethyl-guanosine
  modified_base 9: mod_base = OTHER; note = 2'-O-methoxyethyl-adenosine
  modified_base 10: mod_base = OTHER; note = 2'-O-methoxyethyl-adenosine
  modified_base 11: mod_base = OTHER; note = 2'-O-methoxyethyl-adenosine
  modified_base 12: mod_base = OTHER; note = 2'-O-methoxyethyl-thymidine
  modified_base 13: mod_base = OTHER; note = 2'-O-methoxyethyl-guanosine
  modified_base 14: mod_base = OTHER; note = 2'-O-methoxyethyl-guanosine
  modified_base 15: mod_base = OTHER; note = 2'-O-methoxyethyl-adenosine
  modified_base 16: mod_base = OTHER; note = 2'-O-methoxyethyl-thymidine
  modified_base 17: mod_base = OTHER; note = 2'-O-methoxyethyl-adenosine
  modified_base 18: mod_base = OTHER; note = 2'-O-methoxyethyl-thymidine
cctgacagaaatggatat

SEQ ID NO: 347 - RNA, 18 nt, synthetic construct
  source 1..18: mol_type = other RNA
  modified_base 1: mod_base = OTHER; note = 2'-O-methoxyethyl-5'-methylcytidine
  modified_base 2: mod_base = OTHER; note = 2'-O-methoxyethyl-adenosine
  modified_base 3: mod_base = OTHER; note = 2'-O-methoxyethyl-5'-methylcytidine
  modified_base 4: mod_base = OTHER; note = 2'-O-methoxyethyl-5'-methylcytidine
  modified_base 5: mod_base = OTHER; note = 2'-O-methoxyethyl-5'-methylcytidine
  modified_base 6: mod_base = OTHER; note = 2'-O-methoxyethyl-thymidine
  modified_base 7: mod_base = OTHER; note = 2'-O-methoxyethyl-guanosine
  modified_base 8: mod_base = OTHER; note = 2'-O-methoxyethyl-adenosine
  modified_base 9: mod_base = OTHER; note = 2'-O-methoxyethyl-5'-methylcytidine
  modified_base 10: mod_base = OTHER; note = 2'-O-methoxyethyl-adenosine
  modified_base 11: mod_base = OTHER; note = 2'-O-methoxyethyl-guanosine
  modified_base 12: mod_base = OTHER; note = 2'-O-methoxyethyl-adenosine
  modified_base 13: mod_base = OTHER; note = 2'-O-methoxyethyl-adenosine
  modified_base 14: mod_base = OTHER; note = 2'-O-methoxyethyl-adenosine
  modified_base 15: mod_base = OTHER; note = 2'-O-methoxyethyl-thymidine
  modified_base 16: mod_base = OTHER; note = 2'-O-methoxyethyl-guanosine
  modified_base 17: mod_base = OTHER; note = 2'-O-methoxyethyl-guanosine
  modified_base 18: mod_base = OTHER; note = 2'-O-methoxyethyl-adenosine
caccctgacagaaatgga

SEQ ID NO: 348 - RNA, 18 nt, synthetic construct
  source 1..18: mol_type = other RNA
  modified_base 1: mod_base = OTHER; note = 2'-O-methoxyethyl-adenosine
  modified_base 2: mod_base = OTHER; note = 2'-O-methoxyethyl-5'-methylcytidine
  modified_base 3: mod_base = OTHER; note = 2'-O-methoxyethyl-thymidine
  modified_base 4: mod_base = OTHER; note = 2'-O-methoxyethyl-5'-methylcytidine
  modified_base 5: mod_base = OTHER; note = 2'-O-methoxyethyl-adenosine
  modified_base 6: mod_base = OTHER; note = 2'-O-methoxyethyl-5'-methylcytidine
  modified_base 7: mod_base = OTHER; note = 2'-O-methoxyethyl-5'-methylcytidine
  modified_base 8: mod_base = OTHER; note = 2'-O-methoxyethyl-5'-methylcytidine
  modified_base 9: mod_base = OTHER; note = 2'-O-methoxyethyl-thymidine
  modified_base 10: mod_base = OTHER; note = 2'-O-methoxyethyl-guanosine
  modified_base 11: mod_base = OTHER; note = 2'-O-methoxyethyl-adenosine
  modified_base 12: mod_base = OTHER; note = 2'-O-methoxyethyl-5'-methylcytidine
  modified_base 13: mod_base = OTHER; note = 2'-O-methoxyethyl-adenosine
  modified_base 14: mod_base = OTHER; note = 2'-O-methoxyethyl-guanosine
  modified_base 15: mod_base = OTHER; note = 2'-O-methoxyethyl-adenosine
  modified_base 16: mod_base = OTHER; note = 2'-O-methoxyethyl-adenosine
  modified_base 17: mod_base = OTHER; note = 2'-O-methoxyethyl-adenosine
  modified_base 18: mod_base = OTHER; note = 2'-O-methoxyethyl-thymidine
actcaccctgacagaaat

SEQ ID NO: 349 - RNA, 18 nt, synthetic construct
  source 1..18: mol_type = other RNA
  modified_base 1: mod_base = OTHER; note = 2'-O-methoxyethyl-adenosine
  modified_base 2: mod_base = OTHER; note = 2'-O-methoxyethyl-adenosine
  modified_base 3: mod_base = OTHER; note = 2'-O-methoxyethyl-adenosine
  modified_base 4: mod_base = OTHER; note = 2'-O-methoxyethyl-adenosine
  modified_base 5: mod_base = OTHER; note = 2'-O-methoxyethyl-5'-methylcytidine
  modified_base 6: mod_base = OTHER; note = 2'-O-methoxyethyl-thymidine
  modified_base 7: mod_base = OTHER; note = 2'-O-methoxyethyl-5'-methylcytidine
  modified_base 8: mod_base = OTHER; note = 2'-O-methoxyethyl-adenosine
  modified_base 9: mod_base = OTHER; note = 2'-O-methoxyethyl-5'-methylcytidine
  modified_base 10: mod_base = OTHER; note = 2'-O-methoxyethyl-5'-methylcytidine
  modified_base 11: mod_base = OTHER; note = 2'-O-methoxyethyl-5'-methylcytidine
  modified_base 12: mod_base = OTHER; note = 2'-O-methoxyethyl-thymidine
  modified_base 13: mod_base = OTHER; note = 2'-O-methoxyethyl-guanosine
  modified_base 14: mod_base = OTHER; note = 2'-O-methoxyethyl-adenosine
  modified_base 15: mod_base = OTHER; note = 2'-O-methoxyethyl-5'-methylcytidine
  modified_base 16: mod_base = OTHER; note = 2'-O-methoxyethyl-adenosine
  modified_base 17: mod_base = OTHER; note = 2'-O-methoxyethyl-guanosine
  modified_base 18: mod_base = OTHER; note = 2'-O-methoxyethyl-adenosine
aaaactcaccctgacaga

SEQ ID NO: 350 - RNA, 18 nt, synthetic construct
  source 1..18: mol_type = other RNA
  modified_base 1: mod_base = OTHER; note = 2'-O-methoxyethyl-thymidine
  modified_base 2: mod_base = OTHER; note = 2'-O-methoxyethyl-thymidine
  modified_base 3: mod_base = OTHER; note = 2'-O-methoxyethyl-thymidine
  modified_base 4: mod_base = OTHER; note = 2'-O-methoxyethyl-adenosine
  modified_base 5: mod_base = OTHER; note = 2'-O-methoxyethyl-adenosine
  modified_base 6: mod_base = OTHER; note = 2'-O-methoxyethyl-adenosine
  modified_base 7: mod_base = OTHER; note = 2'-O-methoxyethyl-adenosine
  modified_base 8: mod_base = OTHER; note = 2'-O-methoxyethyl-5'-methylcytidine
  modified_base 9: mod_base = OTHER; note = 2'-O-methoxyethyl-thymidine
  modified_base 10: mod_base = OTHER; note = 2'-O-methoxyethyl-5'-methylcytidine
  modified_base 11: mod_base = OTHER; note = 2'-O-methoxyethyl-adenosine
  modified_base 12: mod_base = OTHER; note = 2'-O-methoxyethyl-5'-methylcytidine
  modified_base 13: mod_base = OTHER; note = 2'-O-methoxyethyl-5'-methylcytidine
  modified_base 14: mod_base = OTHER; note = 2'-O-methoxyethyl-5'-methylcytidine
  modified_base 15: mod_base = OTHER; note = 2'-O-methoxyethyl-thymidine
  modified_base 16: mod_base = OTHER; note = 2'-O-methoxyethyl-guanosine
  modified_base 17: mod_base = OTHER; note = 2'-O-methoxyethyl-adenosine
  modified_base 18: mod_base = OTHER; note = 2'-O-methoxyethyl-5'-methylcytidine
tttaaaactcaccctgac

SEQ ID NO: 351 - RNA, 18 nt, synthetic construct
  source 1..18: mol_type = other RNA
  modified_base 1: mod_base = OTHER; note = 2'-O-methoxyethyl-adenosine
  modified_base 2: mod_base = OTHER; note = 2'-O-methoxyethyl-adenosine
  modified_base 3: mod_base = OTHER; note = 2'-O-methoxyethyl-adenosine
  modified_base 4: mod_base = OTHER; note = 2'-O-methoxyethyl-thymidine
  modified_base 5: mod_base = OTHER; note = 2'-O-methoxyethyl-thymidine
  modified_base 6: mod_base = OTHER; note = 2'-O-methoxyethyl-thymidine
  modified_base 7: mod_base = OTHER; note = 2'-O-methoxyethyl-adenosine
  modified_base 8: mod_base = OTHER; note = 2'-O-methoxyethyl-adenosine
  modified_base 9: mod_base = OTHER; note = 2'-O-methoxyethyl-adenosine
  modified_base 10: mod_base = OTHER; note = 2'-O-methoxyethyl-adenosine
  modified_base 11: mod_base = OTHER; note = 2'-O-methoxyethyl-5'-methylcytidine
  modified_base 12: mod_base = OTHER; note = 2'-O-methoxyethyl-thymidine
  modified_base 13: mod_base = OTHER; note = 2'-O-methoxyethyl-5'-methylcytidine
  modified_base 14: mod_base = OTHER; note = 2'-O-methoxyethyl-adenosine
  modified_base 15: mod_base = OTHER; note = 2'-O-methoxyethyl-5'-methylcytidine
  modified_base 16: mod_base = OTHER; note = 2'-O-methoxyethyl-5'-methylcytidine
  modified_base 17: mod_base = OTHER; note = 2'-O-methoxyethyl-5'-methylcytidine
  modified_base 18: mod_base = OTHER; note = 2'-O-methoxyethyl-thymidine
aaatttaaaactcaccct

SEQ ID NO: 352 - RNA, 18 nt, synthetic construct
  source 1..18: mol_type = other RNA
  modified_base 1: mod_base = OTHER; note = 2'-O-methoxyethyl-adenosine
  modified_base 2: mod_base = OTHER; note = 2'-O-methoxyethyl-adenosine
  modified_base 3: mod_base = OTHER; note = 2'-O-methoxyethyl-thymidine
  modified_base 4: mod_base = OTHER; note = 2'-O-methoxyethyl-adenosine
  modified_base 5: mod_base = OTHER; note = 2'-O-methoxyethyl-adenosine
  modified_base 6: mod_base = OTHER; note = 2'-O-methoxyethyl-adenosine
  modified_base 7: mod_base = OTHER; note = 2'-O-methoxyethyl-thymidine
  modified_base 8: mod_base = OTHER; note = 2'-O-methoxyethyl-thymidine
  modified_base 9: mod_base = OTHER; note = 2'-O-methoxyethyl-thymidine
  modified_base 10: mod_base = OTHER; note = 2'-O-methoxyethyl-adenosine
  modified_base 11: mod_base = OTHER; note = 2'-O-methoxyethyl-adenosine
  modified_base 12: mod_base = OTHER; note = 2'-O-methoxyethyl-adenosine
  modified_base 13: mod_base = OTHER; note = 2'-O-methoxyethyl-adenosine
  modified_base 14: mod_base = OTHER; note = 2'-O-methoxyethyl-5'-methylcytidine
  modified_base 15: mod_base = OTHER; note = 2'-O-methoxyethyl-thymidine
  modified_base 16: mod_base = OTHER; note = 2'-O-methoxyethyl-5'-methylcytidine
  modified_base 17: mod_base = OTHER; note = 2'-O-methoxyethyl-adenosine
  modified_base 18: mod_base = OTHER; note = 2'-O-methoxyethyl-5'-methylcytidine
aataaatttaaaactcac

SEQ ID NO: 353 - RNA, 18 nt, synthetic construct
  source 1..18: mol_type = other RNA
  modified_base 1: mod_base = OTHER; note = 2'-O-methoxyethyl-5'-methylcytidine
  modified_base 2: mod_base = OTHER; note = 2'-O-methoxyethyl-adenosine
  modified_base 3: mod_base = OTHER; note = 2'-O-methoxyethyl-thymidine
  modified_base 4: mod_base = OTHER; note = 2'-O-methoxyethyl-guanosine
  modified_base 5: mod_base = OTHER; note = 2'-O-methoxyethyl-adenosine
  modified_base 6: mod_base = OTHER; note = 2'-O-methoxyethyl-adenosine
  modified_base 7: mod_base = OTHER; note = 2'-O-methoxyethyl-adenosine
  modified_base 8: mod_base = OTHER; note = 2'-O-methoxyethyl-thymidine
  modified_base 9: mod_base = OTHER; note = 2'-O-methoxyethyl-adenosine
  modified_base 10: mod_base = OTHER; note = 2'-O-methoxyethyl-adenosine
  modified_base 11: mod_base = OTHER; note = 2'-O-methoxyethyl-adenosine
  modified_base 12: mod_base = OTHER; note = 2'-O-methoxyethyl-thymidine
  modified_base 13: mod_base = OTHER; note = 2'-O-methoxyethyl-thymidine
  modified_base 14: mod_base = OTHER; note = 2'-O-methoxyethyl-thymidine
  modified_base 15: mod_base = OTHER; note = 2'-O-methoxyethyl-adenosine
  modified_base 16: mod_base = OTHER; note = 2'-O-methoxyethyl-adenosine
  modified_base 17: mod_base = OTHER; note = 2'-O-methoxyethyl-adenosine
  modified_base 18: mod_base = OTHER; note = 2'-O-methoxyethyl-adenosine
catgaaataaatttaaaa

SEQ ID NO: 354 - RNA, 18 nt, synthetic construct
  source 1..18: mol_type = other RNA
  modified_base 1: mod_base = OTHER; note = 2'-O-methoxyethyl-thymidine
  modified_base 2: mod_base = OTHER; note = 2'-O-methoxyethyl-guanosine
  modified_base 3: mod_base = OTHER; note = 2'-O-methoxyethyl-5'-methylcytidine
  modified_base 4: mod_base = OTHER; note = 2'-O-methoxyethyl-adenosine
  modified_base 5: mod_base = OTHER; note = 2'-O-methoxyethyl-thymidine
  modified_base 6: mod_base = OTHER; note = 2'-O-methoxyethyl-5'-methylcytidine
  modified_base 7: mod_base = OTHER; note = 2'-O-methoxyethyl-adenosine
  modified_base 8: mod_base = OTHER; note = 2'-O-methoxyethyl-thymidine
  modified_base 9: mod_base = OTHER; note = 2'-O-methoxyethyl-guanosine
  modified_base 10: mod_base = OTHER; note = 2'-O-methoxyethyl-adenosine
  modified_base 11: mod_base = OTHER; note = 2'-O-methoxyethyl-adenosine
  modified_base 12: mod_base = OTHER; note = 2'-O-methoxyethyl-adenosine
  modified_base 13: mod_base = OTHER; note = 2'-O-methoxyethyl-thymidine
  modified_base 14: mod_base = OTHER; note = 2'-O-methoxyethyl-adenosine
  modified_base 15: mod_base = OTHER; note = 2'-O-methoxyethyl-adenosine
  modified_base 16: mod_base = OTHER; note = 2'-O-methoxyethyl-adenosine
  modified_base 17: mod_base = OTHER; note = 2'-O-methoxyethyl-thymidine
  modified_base 18: mod_base = OTHER; note = 2'-O-methoxyethyl-thymidine
tgcatcatgaaataaatt

SEQ ID NO: 355 - RNA, 18 nt, synthetic construct
  source 1..18: mol_type = other RNA
  modified_base 1: mod_base = OTHER; note = 2'-O-methoxyethyl-thymidine
  modified_base 2: mod_base = OTHER; note = 2'-O-methoxyethyl-thymidine
  modified_base 3: mod_base = OTHER; note = 2'-O-methoxyethyl-guanosine
  modified_base 4: mod_base = OTHER; note = 2'-O-methoxyethyl-thymidine
  modified_base 5: mod_base = OTHER; note = 2'-O-methoxyethyl-thymidine
  modified_base 6: mod_base = OTHER; note = 2'-O-methoxyethyl-thymidine
  modified_base 7: mod_base = OTHER; note = 2'-O-methoxyethyl-guanosine
  modified_base 8: mod_base = OTHER; note = 2'-O-methoxyethyl-5'-methylcytidine
  modified_base 9: mod_base = OTHER; note = 2'-O-methoxyethyl-adenosine
  modified_base 10: mod_base = OTHER; note = 2'-O-methoxyethyl-thymidine
  modified_base 11: mod_base = OTHER; note = 2'-O-methoxyethyl-5'-methylcytidine
  modified_base 12: mod_base = OTHER; note = 2'-O-methoxyethyl-adenosine
  modified_base 13: mod_base = OTHER; note = 2'-O-methoxyethyl-thymidine
  modified_base 14: mod_base = OTHER; note = 2'-O-methoxyethyl-guanosine
  modified_base 15: mod_base = OTHER; note = 2'-O-methoxyethyl-adenosine
  modified_base 16: mod_base = OTHER; note = 2'-O-methoxyethyl-adenosine
  modified_base 17: mod_base = OTHER; note = 2'-O-methoxyethyl-adenosine
  modified_base 18: mod_base = OTHER; note = 2'-O-methoxyethyl-thymidine
ttgtttgcatcatgaaat

SEQ ID NO: 356 - RNA, 18 nt, synthetic construct
  source 1..18: mol_type = other RNA
  modified_base 1: mod_base = OTHER; note = 2'-O-methoxyethyl-adenosine
  modified_base 2: mod_base = OTHER; note = 2'-O-methoxyethyl-thymidine
  modified_base 3: mod_base = OTHER; note = 2'-O-methoxyethyl-adenosine
  modified_base 4: mod_base = OTHER; note = 2'-O-methoxyethyl-thymidine
  modified_base 5: mod_base = OTHER; note = 2'-O-methoxyethyl-adenosine
  modified_base 6: mod_base = OTHER; note = 2'-O-methoxyethyl-thymidine
  modified_base 7: mod_base = OTHER; note = 2'-O-methoxyethyl-thymidine
  modified_base 8: mod_base = OTHER; note = 2'-O-methoxyethyl-guanosine
  modified_base 9: mod_base = OTHER; note = 2'-O-methoxyethyl-thymidine
  modified_base 10: mod_base = OTHER; note = 2'-O-methoxyethyl-thymidine
  modified_base 11: mod_base = OTHER; note = 2'-O-methoxyethyl-thymidine
  modified_base 12: mod_base = OTHER; note = 2'-O-methoxyethyl-guanosine
  modified_base 13: mod_base = OTHER; note = 2'-O-methoxyethyl-5'-methylcytidine
  modified_base 14: mod_base = OTHER; note = 2'-O-methoxyethyl-adenosine
  modified_base 15: mod_base = OTHER; note = 2'-O-methoxyethyl-thymidine
  modified_base 16: mod_base = OTHER; note = 2'-O-methoxyethyl-5'-methylcytidine
  modified_base 17: mod_base = OTHER; note = 2'-O-methoxyethyl-adenosine
  modified_base 18: mod_base = OTHER; note = 2'-O-methoxyethyl-thymidine
atatattgtttgcatcat

SEQ ID NO: 357 - RNA, 18 nt, synthetic construct
  source 1..18: mol_type = other RNA
  modified_base 1: mod_base = OTHER; note = 2'-O-methoxyethyl-guanosine
  modified_base 2: mod_base = OTHER; note = 2'-O-methoxyethyl-thymidine
  modified_base 3: mod_base = OTHER; note = 2'-O-methoxyethyl-thymidine
  modified_base 4: mod_base = OTHER; note = 2'-O-methoxyethyl-5'-methylcytidine
  modified_base 5: mod_base = OTHER; note = 2'-O-methoxyethyl-adenosine
  modified_base 6: mod_base = OTHER; note = 2'-O-methoxyethyl-adenosine
  modified_base 7: mod_base = OTHER; note = 2'-O-methoxyethyl-thymidine
  modified_base 8: mod_base = OTHER; note = 2'-O-methoxyethyl-adenosine
  modified_base 9: mod_base = OTHER; note = 2'-O-methoxyethyl-thymidine
  modified_base 10: mod_base = OTHER; note = 2'-O-methoxyethyl-adenosine
  modified_base 11: mod_base = OTHER; note = 2'-O-methoxyethyl-thymidine
  modified_base 12: mod_base = OTHER; note = 2'-O-methoxyethyl-thymidine
  modified_base 13: mod_base = OTHER; note = 2'-O-methoxyethyl-guanosine
  modified_base 14: mod_base = OTHER; note = 2'-O-methoxyethyl-thymidine
  modified_base 15: mod_base = OTHER; note = 2'-O-methoxyethyl-thymidine
  modified_base 16: mod_base = OTHER; note = 2'-O-methoxyethyl-thymidine
  modified_base 17: mod_base = OTHER; note = 2'-O-methoxyethyl-guanosine
  modified_base 18: mod_base = OTHER; note = 2'-O-methoxyethyl-5'-methylcytidine
gttcaatatattgtttgc

SEQ ID NO: 358 - RNA, 18 nt, synthetic construct
  source 1..18: mol_type = other RNA
  modified_base 1: mod_base = OTHER; note = 2'-O-methoxyethyl-5'-methylcytidine
  modified_base 2: mod_base = OTHER; note = 2'-O-methoxyethyl-thymidine
  modified_base 3: mod_base = OTHER; note = 2'-O-methoxyethyl-guanosine
  modified_base 4: mod_base = OTHER; note = 2'-O-methoxyethyl-thymidine
  modified_base 5: mod_base = OTHER; note = 2'-O-methoxyethyl-thymidine
  modified_base 6: mod_base = OTHER; note = 2'-O-methoxyethyl-guanosine
  modified_base 7: mod_base = OTHER; note = 2'-O-methoxyethyl-thymidine
  modified_base 8: mod_base = OTHER; note = 2'-O-methoxyethyl-thymidine
  modified_base 9: mod_base = OTHER; note = 2'-O-methoxyethyl-5'-methylcytidine
  modified_base 10: mod_base = OTHER; note = 2'-O-methoxyethyl-adenosine
  modified_base 11: mod_base = OTHER; note = 2'-O-methoxyethyl-adenosine
  modified_base 12: mod_base = OTHER; note = 2'-O-methoxyethyl-thymidine
  modified_base 13: mod_base = OTHER; note = 2'-O-methoxyethyl-adenosine
  modified_base 14: mod_base = OTHER; note = 2'-O-methoxyethyl-thymidine
  modified_base 15: mod_base = OTHER; note = 2'-O-methoxyethyl-adenosine
  modified_base 16: mod_base = OTHER; note = 2'-O-methoxyethyl-thymidine
  modified_base 17: mod_base = OTHER; note = 2'-O-methoxyethyl-thymidine
  modified_base 18: mod_base = OTHER; note = 2'-O-methoxyethyl-guanosine
ctgttgttcaatatattg

SEQ ID NO: 359 - RNA, 18 nt, synthetic construct
  source 1..18: mol_type = other RNA
  modified_base 1: mod_base = OTHER; note = 2'-O-methoxyethyl-adenosine
  modified_base 2: mod_base = OTHER; note = 2'-O-methoxyethyl-thymidine
  modified_base 3: mod_base = OTHER; note = 2'-O-methoxyethyl-guanosine
  modified_base 4: mod_base = OTHER; note = 2'-O-methoxyethyl-thymidine
  modified_base 5: mod_base = OTHER; note = 2'-O-methoxyethyl-5'-methylcytidine
  modified_base 6: mod_base = OTHER; note = 2'-O-methoxyethyl-5'-methylcytidine
  modified_base 7: mod_base = OTHER; note = 2'-O-methoxyethyl-thymidine
  modified_base 8: mod_base = OTHER; note = 2'-O-methoxyethyl-guanosine
  modified_base 9: mod_base = OTHER; note = 2'-O-methoxyethyl-thymidine
  modified_base 10: mod_base = OTHER; note = 2'-O-methoxyethyl-thymidine
  modified_base 11: mod_base = OTHER; note = 2'-O-methoxyethyl-guanosine
  modified_base 12: mod_base = OTHER; note = 2'-O-methoxyethyl-thymidine
  modified_base 13: mod_base = OTHER; note = 2'-O-methoxyethyl-thymidine
  modified_base 14: mod_base = OTHER; note = 2'-O-methoxyethyl-5'-methylcytidine
  modified_base 15: mod_base = OTHER; note = 2'-O-methoxyethyl-adenosine
  modified_base 16: mod_base = OTHER; note = 2'-O-methoxyethyl-adenosine
  modified_base 17: mod_base = OTHER; note = 2'-O-methoxyethyl-thymidine
  modified_base 18: mod_base = OTHER; note = 2'-O-methoxyethyl-adenosine
atgtcctgttgttcaata

SEQ ID NO: 360 - RNA, 18 nt, synthetic construct
  source 1..18: mol_type = other RNA
  modified_base 1: mod_base = OTHER; note = 2'-O-methoxyethyl-adenosine
  modified_base 2: mod_base = OTHER; note = 2'-O-methoxyethyl-guanosine
  modified_base 3: mod_base = OTHER; note = 2'-O-methoxyethyl-thymidine
  modified_base 4: mod_base = OTHER; note = 2'-O-methoxyethyl-thymidine
  modified_base 5: mod_base = OTHER; note = 2'-O-methoxyethyl-5'-methylcytidine
  modified_base 6: mod_base = OTHER; note = 2'-O-methoxyethyl-adenosine
  modified_base 7: mod_base = OTHER; note = 2'-O-methoxyethyl-thymidine
  modified_base 8: mod_base = OTHER; note = 2'-O-methoxyethyl-guanosine
  modified_base 9: mod_base = OTHER; note = 2'-O-methoxyethyl-thymidine
  modified_base 10: mod_base = OTHER; note = 2'-O-methoxyethyl-5'-methylcytidine
  modified_base 11: mod_base = OTHER; note = 2'-O-methoxyethyl-5'-methylcytidine
  modified_base 12: mod_base = OTHER; note = 2'-O-methoxyethyl-thymidine
  modified_base 13: mod_base = OTHER; note = 2'-O-methoxyethyl-guanosine
  modified_base 14: mod_base = OTHER; note = 2'-O-methoxyethyl-thymidine
  modified_base 15: mod_base = OTHER; note = 2'-O-methoxyethyl-thymidine
  modified_base 16: mod_base = OTHER; note = 2'-O-methoxyethyl-guanosine
  modified_base 17: mod_base = OTHER; note = 2'-O-methoxyethyl-thymidine
  modified_base 18: mod_base = OTHER; note = 2'-O-methoxyethyl-thymidine
agttcatgtcctgttgtt

SEQ ID NO: 361 - RNA, 18 nt, synthetic construct
  source 1..18: mol_type = other RNA
  modified_base 1: mod_base = OTHER; note = 2'-O-methoxyethyl-guanosine
  modified_base 2: mod_base = OTHER; note = 2'-O-methoxyethyl-adenosine
  modified_base 3: mod_base = OTHER; note = 2'-O-methoxyethyl-adenosine
  modified_base 4: mod_base = OTHER; note = 2'-O-methoxyethyl-5'-methylcytidine
  modified_base 5: mod_base = OTHER; note = 2'-O-methoxyethyl-adenosine
  modified_base 6: mod_base = OTHER; note = 2'-O-methoxyethyl-adenosine
  modified_base 7: mod_base = OTHER; note = 2'-O-methoxyethyl-guanosine
  modified_base 8: mod_base = OTHER; note = 2'-O-methoxyethyl-thymidine
  modified_base 9: mod_base = OTHER; note = 2'-O-methoxyethyl-thymidine
  modified_base 10: mod_base = OTHER; note = 2'-O-methoxyethyl-5'-methylcytidine
  modified_base 11: mod_base = OTHER; note = 2'-O-methoxyethyl-adenosine
  modified_base 12: mod_base = OTHER; note = 2'-O-methoxyethyl-thymidine
  modified_base 13: mod_base = OTHER; note = 2'-O-methoxyethyl-guanosine
  modified_base 14: mod_base = OTHER; note = 2'-O-methoxyethyl-thymidine
  modified_base 15: mod_base = OTHER; note = 2'-O-methoxyethyl-5'-methylcytidine
  modified_base 16: mod_base = OTHER; note = 2'-O-methoxyethyl-5'-methylcytidine
  modified_base 17: mod_base = OTHER; note = 2'-O-methoxyethyl-thymidine
  modified_base 18: mod_base = OTHER; note = 2'-O-methoxyethyl-guanosine
gaacaagttcatgtcctg

SEQ ID NO: 362 - RNA, 18 nt, synthetic construct
  source 1..18: mol_type = other RNA
  modified_base 1: mod_base = OTHER; note = 2'-O-methoxyethyl-adenosine
  modified_base 2: mod_base = OTHER; note = 2'-O-methoxyethyl-adenosine
  modified_base 3: mod_base = OTHER; note = 2'-O-methoxyethyl-5'-methylcytidine
  modified_base 4: mod_base = OTHER; note = 2'-O-methoxyethyl-adenosine
  modified_base 5: mod_base = OTHER; note = 2'-O-methoxyethyl-adenosine
  modified_base 6: mod_base = OTHER; note = 2'-O-methoxyethyl-guanosine
  modified_base 7: mod_base = OTHER; note = 2'-O-methoxyethyl-adenosine
  modified_base 8: mod_base = OTHER; note = 2'-O-methoxyethyl-adenosine
  modified_base 9: mod_base = OTHER; note = 2'-O-methoxyethyl-5'-methylcytidine
  modified_base 10: mod_base = OTHER; note = 2'-O-methoxyethyl-adenosine
  modified_base 11: mod_base = OTHER; note = 2'-O-methoxyethyl-adenosine
  modified_base 12: mod_base = OTHER; note = 2'-O-methoxyethyl-guanosine
  modified_base 13: mod_base = OTHER; note = 2'-O-methoxyethyl-thymidine
  modified_base 14: mod_base = OTHER; note = 2'-O-methoxyethyl-thymidine
  modified_base 15: mod_base = OTHER; note = 2'-O-methoxyethyl-5'-methylcytidine
  modified_base 16: mod_base = OTHER; note = 2'-O-methoxyethyl-adenosine
  modified_base 17: mod_base = OTHER; note = 2'-O-methoxyethyl-thymidine
  modified_base 18: mod_base = OTHER; note = 2'-O-methoxyethyl-guanosine
aacaagaacaagttcatg

SEQ ID NO: 363 - RNA, 18 nt, synthetic construct
  source 1..18: mol_type = other RNA
  modified_base 1: mod_base = OTHER; note = 2'-O-methoxyethyl-5'-methylcytidine
  modified_base 2: mod_base = OTHER; note = 2'-O-methoxyethyl-thymidine
  modified_base 3: mod_base = OTHER; note = 2'-O-methoxyethyl-thymidine
  modified_base 4: mod_base = OTHER; note = 2'-O-methoxyethyl-adenosine
  modified_base 5: mod_base = OTHER; note = 2'-O-methoxyethyl-5'-methylcytidine
  modified_base 6: mod_base = OTHER; note = 2'-O-methoxyethyl-adenosine
  modified_base 7: mod_base = OTHER; note = 2'-O-methoxyethyl-adenosine
  modified_base 8: mod_base = OTHER; note = 2'-O-methoxyethyl-5'-methylcytidine
  modified_base 9: mod_base = OTHER; note = 2'-O-methoxyethyl-adenosine
  modified_base 10: mod_base = OTHER; note = 2'-O-methoxyethyl-adenosine
  modified_base 11: mod_base = OTHER; note = 2'-O-methoxyethyl-guanosine
  modified_base 12: mod_base = OTHER; note = 2'-O-methoxyethyl-adenosine
  modified_base 13: mod_base = OTHER; note = 2'-O-methoxyethyl-adenosine
  modified_base 14: mod_base = OTHER; note = 2'-O-methoxyethyl-5'-methylcytidine
  modified_base 15: mod_base = OTHER; note = 2'-O-methoxyethyl-adenosine
  modified_base 16: mod_base = OTHER; note = 2'-O-methoxyethyl-adenosine
  modified_base 17: mod_base = OTHER; note = 2'-O-methoxyethyl-guanosine
  modified_base 18: mod_base = OTHER; note = 2'-O-methoxyethyl-thymidine
cttacaacaagaacaagt

SEQ ID NO: 364 - RNA, 18 nt, synthetic construct
  source 1..18: mol_type = other RNA
  modified_base 1: mod_base = OTHER; note = 2'-O-methoxyethyl-adenosine
  modified_base 2: mod_base = OTHER; note = 2'-O-methoxyethyl-guanosine
  modified_base 3: mod_base = OTHER; note = 2'-O-methoxyethyl-5'-methylcytidine
  modified_base 4: mod_base = OTHER; note = 2'-O-methoxyethyl-5'-methylcytidine
  modified_base 5: mod_base = OTHER; note = 2'-O-methoxyethyl-adenosine
  modified_base 6: mod_base = OTHER; note = 2'-O-methoxyethyl-5'-methylcytidine
  modified_base 7: mod_base = OTHER; note = 2'-O-methoxyethyl-thymidine
  modified_base 8: mod_base = OTHER; note = 2'-O-methoxyethyl-thymidine
  modified_base 9: mod_base = OTHER; note = 2'-O-methoxyethyl-adenosine
  modified_base 10: mod_base = OTHER; note = 2'-O-methoxyethyl-5'-methylcytidine
  modified_base 11: mod_base = OTHER; note = 2'-O-methoxyethyl-adenosine
  modified_base 12: mod_base = OTHER; note = 2'-O-methoxyethyl-adenosine
  modified_base 13: mod_base = OTHER; note = 2'-O-methoxyethyl-5'-methylcytidine
  modified_base 14: mod_base = OTHER; note = 2'-O-methoxyethyl-adenosine
  modified_base 15: mod_base = OTHER; note = 2'-O-methoxyethyl-adenosine
  modified_base 16: mod_base = OTHER; note = 2'-O-methoxyethyl-guanosine
  modified_base 17: mod_base = OTHER; note = 2'-O-methoxyethyl-adenosine
  modified_base 18: mod_base = OTHER; note = 2'-O-methoxyethyl-adenosine
agccacttacaacaagaa

SEQ ID NO: 365 - RNA, 18 nt, synthetic construct
  source 1..18: mol_type = other RNA
  modified_base 1: mod_base = OTHER; note = 2'-O-methoxyethyl-adenosine
  modified_base 2: mod_base = OTHER; note = 2'-O-methoxyethyl-adenosine
  modified_base 3: mod_base = OTHER; note = 2'-O-methoxyethyl-thymidine
  modified_base 4: mod_base = OTHER; note = 2'-O-methoxyethyl-thymidine
  modified_base 5: mod_base = OTHER; note = 2'-O-methoxyethyl-5'-methylcytidine
  modified_base 6: mod_base = OTHER; note = 2'-O-methoxyethyl-adenosine
  modified_base 7: mod_base = OTHER; note = 2'-O-methoxyethyl-guanosine
  modified_base 8: mod_base = OTHER; note = 2'-O-methoxyethyl-5'-methylcytidine
  modified_base 9: mod_base = OTHER; note = 2'-O-methoxyethyl-5'-methylcytidine
  modified_base 10: mod_base = OTHER; note = 2'-O-methoxyethyl-adenosine
  modified_base 11: mod_base = OTHER; note = 2'-O-methoxyethyl-5'-methylcytidine
  modified_base 12: mod_base = OTHER; note = 2'-O-methoxyethyl-thymidine
  modified_base 13: mod_base = OTHER; note = 2'-O-methoxyethyl-thymidine
  modified_base 14: mod_base = OTHER; note = 2'-O-methoxyethyl-adenosine
  modified_base 15: mod_base = OTHER; note = 2'-O-methoxyethyl-5'-methylcytidine
  modified_base 16: mod_base = OTHER; note = 2'-O-methoxyethyl-adenosine
  modified_base 17: mod_base = OTHER; note = 2'-O-methoxyethyl-adenosine
  modified_base 18: mod_base = OTHER; note = 2'-O-methoxyethyl-5'-methylcytidine
aattcagccacttacaac

SEQ ID NO: 366 - RNA, 18 nt, synthetic construct
  source 1..18: mol_type = other RNA
  modified_base 1: mod_base = OTHER; note = 2'-O-methoxyethyl-guanosine
  modified_base 2: mod_base = OTHER; note = 2'-O-methoxyethyl-adenosine
  modified_base 3: mod_base = OTHER; note = 2'-O-methoxyethyl-thymidine
  modified_base 4: mod_base = OTHER; note = 2'-O-methoxyethyl-adenosine
  modified_base 5: mod_base = OTHER; note = 2'-O-methoxyethyl-adenosine
  modified_base 6: mod_base = OTHER; note = 2'-O-methoxyethyl-adenosine
  modified_base 7: mod_base = OTHER; note = 2'-O-methoxyethyl-adenosine
  modified_base 8: mod_base = OTHER; note = 2'-O-methoxyethyl-thymidine
  modified_base 9: mod_base = OTHER; note = 2'-O-methoxyethyl-thymidine
  modified_base 10: mod_base = OTHER; note = 2'-O-methoxyethyl-5'-methylcytidine
  modified_base 11: mod_base = OTHER; note = 2'-O-methoxyethyl-adenosine
  modified_base 12: mod_base = OTHER; note = 2'-O-methoxyethyl-guanosine
  modified_base 13: mod_base = OTHER; note = 2'-O-methoxyethyl-5'-methylcytidine
  modified_base 14: mod_base = OTHER; note = 2'-O-methoxyethyl-5'-methylcytidine
  modified_base 15: mod_base = OTHER; note = 2'-O-methoxyethyl-adenosine
  modified_base 16: mod_base = OTHER; note = 2'-O-methoxyethyl-5'-methylcytidine
  modified_base 17: mod_base = OTHER; note = 2'-O-methoxyethyl-thymidine
  modified_base 18: mod_base = OTHER; note = 2'-O-methoxyethyl-thymidine
gataaaattcagccactt

SEQ ID NO: 367 - RNA, 18 nt, synthetic construct
  source 1..18: mol_type = other RNA
  modified_base 1: mod_base = OTHER; note = 2'-O-methoxyethyl-thymidine
  modified_base 2: mod_base = OTHER; note = 2'-O-methoxyethyl-thymidine
  modified_base 3: mod_base = OTHER; note = 2'-O-methoxyethyl-adenosine
  modified_base 4: mod_base = OTHER; note = 2'-O-methoxyethyl-5'-methylcytidine
  modified_base 5: mod_base = OTHER; note = 2'-O-methoxyethyl-thymidine
  modified_base 6: mod_base = OTHER; note = 2'-O-methoxyethyl-guanosine
  modified_base 7: mod_base = OTHER; note = 2'-O-methoxyethyl-adenosine
  modified_base 8: mod_base = OTHER; note = 2'-O-methoxyethyl-thymidine
  modified_base 9: mod_base = OTHER; note = 2'-O-methoxyethyl-adenosine
  modified_base 10: mod_base = OTHER; note = 2'-O-methoxyethyl-adenosine
  modified_base 11: mod_base = OTHER; note = 2'-O-methoxyethyl-adenosine
  modified_base 12: mod_base = OTHER; note = 2'-O-methoxyethyl-adenosine
  modified_base 13: mod_base = OTHER; note = 2'-O-methoxyethyl-thymidine
  modified_base 14: mod_base = OTHER; note = 2'-O-methoxyethyl-thymidine
  modified_base 15: mod_base = OTHER; note = 2'-O-methoxyethyl-5'-methylcytidine
  modified_base 16: mod_base = OTHER; note = 2'-O-methoxyethyl-adenosine
  modified_base 17: mod_base = OTHER; note = 2'-O-methoxyethyl-guanosine
  modified_base 18: mod_base = OTHER; note = 2'-O-methoxyethyl-5'-methylcytidine
ttactgataaaattcagc

SEQ ID NO: 368 - RNA, 18 nt, synthetic construct
  source 1..18: mol_type = other RNA
  modified_base 1: mod_base = OTHER; note = 2'-O-methoxyethyl-guanosine
  modified_base 2: mod_base = OTHER; note = 2'-O-methoxyethyl-thymidine
  modified_base 3: mod_base = OTHER; note = 2'-O-methoxyethyl-guanosine
  modified_base 4: mod_base = OTHER; note = 2'-O-methoxyethyl-5'-methylcytidine
  modified_base 5: mod_base = OTHER; note = 2'-O-methoxyethyl-thymidine
  modified_base 6: mod_base = OTHER; note = 2'-O-methoxyethyl-thymidine
  modified_base 7: mod_base = OTHER; note = 2'-O-methoxyethyl-thymidine
  modified_base 8: mod_base = OTHER; note = 2'-O-methoxyethyl-adenosine
  modified_base 9: mod_base = OTHER; note = 2'-O-methoxyethyl-5'-methylcytidine
  modified_base 10: mod_base = OTHER; note = 2'-O-methoxyethyl-thymidine
  modified_base 11: mod_base = OTHER; note = 2'-O-methoxyethyl-guanosine
  modified_base 12: mod_base = OTHER; note = 2'-O-methoxyethyl-adenosine
  modified_base 13: mod_base = OTHER; note = 2'-O-methoxyethyl-thymidine
  modified_base 14: mod_base = OTHER; note = 2'-O-methoxyethyl-adenosine
  modified_base 15: mod_base = OTHER; note = 2'-O-methoxyethyl-adenosine
  modified_base 16: mod_base = OTHER; note = 2'-O-methoxyethyl-adenosine
  modified_base 17: mod_base = OTHER; note = 2'-O-methoxyethyl-adenosine
  modified_base 18: mod_base = OTHER; note = 2'-O-methoxyethyl-thymidine
gtgctttactgataaaat

SEQ ID NO: 369 - RNA, 18 nt, synthetic construct
  source 1..18: mol_type = other RNA
  modified_base 1: mod_base = OTHER; note = 2'-O-methoxyethyl-thymidine
  modified_base 2: mod_base = OTHER; note = 2'-O-methoxyethyl-thymidine
  modified_base 3: mod_base = OTHER; note = 2'-O-methoxyethyl-guanosine
  modified_base 4: mod_base = OTHER; note = 2'-O-methoxyethyl-adenosine
  modified_base 5: mod_base = OTHER; note = 2'-O-methoxyethyl-thymidine
  modified_base 6: mod_base = OTHER; note = 2'-O-methoxyethyl-guanosine
  modified_base 7: mod_base = OTHER; note = 2'-O-methoxyethyl-thymidine
  modified_base 8: mod_base = OTHER; note = 2'-O-methoxyethyl-guanosine
  modified_base 9: mod_base = OTHER; note = 2'-O-methoxyethyl-5'-methylcytidine
  modified_base 10: mod_base = OTHER; note = 2'-O-methoxyethyl-thymidine
  modified_base 11: mod_base = OTHER; note = 2'-O-methoxyethyl-thymidine
  modified_base 12: mod_base = OTHER; note = 2'-O-methoxyethyl-thymidine
  modified_base 13: mod_base = OTHER; note = 2'-O-methoxyethyl-adenosine
  modified_base 14: mod_base = OTHER; note = 2'-O-methoxyethyl-5'-methylcytidine
  modified_base 15: mod_base = OTHER; note = 2'-O-methoxyethyl-thymidine
  modified_base 16: mod_base = OTHER; note = 2'-O-methoxyethyl-guanosine
  modified_base 17: mod_base = OTHER; note = 2'-O-methoxyethyl-adenosine
  modified_base 18: mod_base = OTHER; note = 2'-O-methoxyethyl-thymidine
ttgatgtgctttactgat

SEQ ID NO: 370 - RNA, 18 nt, synthetic construct
  source 1..18: mol_type = other RNA
  modified_base 1: mod_base = OTHER; note = 2'-O-methoxyethyl-thymidine
  modified_base 2: mod_base = OTHER; note = 2'-O-methoxyethyl-guanosine
  modified_base 3: mod_base = OTHER; note = 2'-O-methoxyethyl-guanosine
  modified_base 4: mod_base = OTHER; note = 2'-O-methoxyethyl-adenosine
  modified_base 5: mod_base = OTHER; note = 2'-O-methoxyethyl-guanosine
  modified_base 6: mod_base = OTHER; note = 2'-O-methoxyethyl-adenosine
  modified_base 7: mod_base = OTHER; note = 2'-O-methoxyethyl-adenosine
  modified_base 8: mod_base = OTHER; note = 2'-O-methoxyethyl-adenosine
  modified_base 9: mod_base = OTHER; note = 2'-O-methoxyethyl-guanosine
  modified_base 10: mod_base = OTHER; note = 2'-O-methoxyethyl-adenosine
  modified_base 11: mod_base = OTHER; note = 2'-O-methoxyethyl-guanosine
  modified_base 12: mod_base = OTHER; note = 2'-O-methoxyethyl-5'-methylcytidine
  modified_base 13: mod_base = OTHER; note = 2'-O-methoxyethyl-guanosine
  modified_base 14: mod_base = OTHER; note = 2'-O-methoxyethyl-guanosine
  modified_base 15: mod_base = OTHER; note = 2'-O-methoxyethyl-adenosine
  modified_base 16: mod_base = OTHER; note = 2'-O-methoxyethyl-adenosine
  modified_base 17: mod_base = OTHER; note = 2'-O-methoxyethyl-thymidine
  modified_base 18: mod_base = OTHER; note = 2'-O-methoxyethyl-5'-methylcytidine
tggagaaagagcggaatc

SEQ ID NO: 371 - RNA, 18 nt, synthetic construct
  source 1..18: mol_type = other RNA
  modified_base 1: mod_base = OTHER; note = 2'-O-methoxyethyl-adenosine
  modified_base 2: mod_base = OTHER; note = 2'-O-methoxyethyl-thymidine
  modified_base 3: mod_base = OTHER; note = 2'-O-methoxyethyl-guanosine
  modified_base 4: mod_base = OTHER; note = 2'-O-methoxyethyl-guanosine
  modified_base 5: mod_base = OTHER; note = 2'-O-methoxyethyl-adenosine
  modified_base 6: mod_base = OTHER; note = 2'-O-methoxyethyl-guanosine
  modified_base 7: mod_base = OTHER; note = 2'-O-methoxyethyl-adenosine
  modified_base 8: mod_base = OTHER; note = 2'-O-methoxyethyl-adenosine
  modified_base 9: mod_base = OTHER; note = 2'-O-methoxyethyl-adenosine
  modified_base 10: mod_base = OTHER; note = 2'-O-methoxyethyl-guanosine
  modified_base 11: mod_base = OTHER; note = 2'-O-methoxyethyl-adenosine
  modified_base 12: mod_base = OTHER; note = 2'-O-methoxyethyl-guanosine
  modified_base 13: mod_base = OTHER; note = 2'-O-methoxyethyl-5'-methylcytidine
  modified_base 14: mod_base = OTHER; note = 2'-O-methoxyethyl-guanosine
  modified_base 15: mod_base = OTHER; note = 2'-O-methoxyethyl-guanosine
  modified_base 16: mod_base = OTHER; note = 2'-O-methoxyethyl-adenosine
  modified_base 17: mod_base = OTHER; note = 2'-O-methoxyethyl-adenosine
  modified_base 18: mod_base = OTHER; note = 2'-O-methoxyethyl-thymidine
atggagaaagagcggaat

SEQ ID NO: 372 - RNA, 18 nt, synthetic construct
  source 1..18: mol_type = other RNA
  modified_base 1: mod_base = OTHER; note = 2'-O-methoxyethyl-guanosine
  modified_base 2: mod_base = OTHER; note = 2'-O-methoxyethyl-adenosine
  modified_base 3: mod_base = OTHER; note = 2'-O-methoxyethyl-thymidine
  modified_base 4: mod_base = OTHER; note = 2'-O-methoxyethyl-guanosine
  modified_base 5: mod_base = OTHER; note = 2'-O-methoxyethyl-guanosine
  modified_base 6: mod_base = OTHER; note = 2'-O-methoxyethyl-adenosine
  modified_base 7: mod_base = OTHER; note = 2'-O-methoxyethyl-guanosine
  modified_base 8: mod_base = OTHER; note = 2'-O-methoxyethyl-adenosine
  modified_base 9: mod_base = OTHER; note = 2'-O-methoxyethyl-adenosine
  modified_base 10: mod_base = OTHER; note = 2'-O-methoxyethyl-adenosine
  modified_base 11: mod_base = OTHER; note = 2'-O-methoxyethyl-guanosine
  modified_base 12: mod_base = OTHER; note = 2'-O-methoxyethyl-adenosine
  modified_base 13: mod_base = OTHER; note = 2'-O-methoxyethyl-guanosine
  modified_base 14: mod_base = OTHER; note = 2'-O-methoxyethyl-5'-methylcytidine
  modified_base 15: mod_base = OTHER; note = 2'-O-methoxyethyl-guanosine
  modified_base 16: mod_base = OTHER; note = 2'-O-methoxyethyl-guanosine
  modified_base 17: mod_base = OTHER; note = 2'-O-methoxyethyl-adenosine
  modified_base 18: mod_base = OTHER; note = 2'-O-methoxyethyl-adenosine
gatggagaaagagcggaa

SEQ ID NO: 373 - RNA, 18 nt, synthetic construct
  source 1..18: mol_type = other RNA
  modified_base 1: mod_base = OTHER; note = 2'-O-methoxyethyl-thymidine
  modified_base 2: mod_base = OTHER; note = 2'-O-methoxyethyl-guanosine
  modified_base 3: mod_base = OTHER; note = 2'-O-methoxyethyl-adenosine
  modified_base 4: mod_base = OTHER; note = 2'-O-methoxyethyl-thymidine
  modified_base 5: mod_base = OTHER; note = 2'-O-methoxyethyl-guanosine
  modified_base 6: mod_base = OTHER; note = 2'-O-methoxyethyl-guanosine
  modified_base 7: mod_base = OTHER; note = 2'-O-methoxyethyl-adenosine
  modified_base 8: mod_base = OTHER; note = 2'-O-methoxyethyl-guanosine
  modified_base 9: mod_base = OTHER; note = 2'-O-methoxyethyl-adenosine
  modified_base 10: mod_base = OTHER; note = 2'-O-methoxyethyl-adenosine
  modified_base 11: mod_base = OTHER; note = 2'-O-methoxyethyl-adenosine
  modified_base 12: mod_base = OTHER; note = 2'-O-methoxyethyl-guanosine
  modified_base 13: mod_base = OTHER; note = 2'-O-methoxyethyl-adenosine
  modified_base 14: mod_base = OTHER; note = 2'-O-methoxyethyl-guanosine
  modified_base 15: mod_base = OTHER; note = 2'-O-methoxyethyl-5'-methylcytidine
  modified_base 16: mod_base = OTHER; note = 2'-O-methoxyethyl-guanosine
  modified_base 17: mod_base = OTHER; note = 2'-O-methoxyethyl-guanosine
  modified_base 18: mod_base = OTHER; note = 2'-O-methoxyethyl-adenosine
tgatggagaaagagcgga

SEQ ID NO: 374 - RNA, 18 nt, synthetic construct
  source 1..18: mol_type = other RNA
  modified_base 1: mod_base = OTHER; note = 2'-O-methoxyethyl-adenosine
  modified_base 2: mod_base = OTHER; note = 2'-O-methoxyethyl-5'-methylcytidine
  modified_base 3: mod_base = OTHER; note = 2'-O-methoxyethyl-thymidine
  modified_base 4: mod_base = OTHER; note = 2'-O-methoxyethyl-guanosine
  modified_base 5: mod_base = OTHER; note = 2'-O-methoxyethyl-adenosine
  modified_base 6: mod_base = OTHER; note = 2'-O-methoxyethyl-thymidine
  modified_base 7: mod_base = OTHER; note = 2'-O-methoxyethyl-guanosine
  modified_base 8: mod_base = OTHER; note = 2'-O-methoxyethyl-guanosine
  modified_base 9: mod_base = OTHER; note = 2'-O-methoxyethyl-adenosine
  modified_base 10: mod_base = OTHER; note = 2'-O-methoxyethyl-guanosine
  modified_base 11: mod_base = OTHER; note = 2'-O-methoxyethyl-adenosine
  modified_base 12: mod_base = OTHER; note = 2'-O-methoxyethyl-adenosine
  modified_base 13: mod_base = OTHER; note = 2'-O-methoxyethyl-adenosine
  modified_base 14: mod_base = OTHER; note = 2'-O-methoxyethyl-guanosine
  modified_base 15: mod_base = OTHER; note = 2'-O-methoxyethyl-adenosine
  modified_base 16: mod_base = OTHER; note = 2'-O-methoxyethyl-guanosine
  modified_base 17: mod_base = OTHER; note = 2'-O-methoxyethyl-5'-methylcytidine
  modified_base 18: mod_base = OTHER; note = 2'-O-methoxyethyl-guanosine
actgatggagaaagagcg

SEQ ID NO: 375 - RNA, 18 nt, synthetic construct
  source 1..18: mol_type = other RNA
  modified_base 1: mod_base = OTHER; note = 2'-O-methoxyethyl-adenosine
  modified_base 2: mod_base = OTHER; note = 2'-O-methoxyethyl-adenosine
  modified_base 3: mod_base = OTHER; note = 2'-O-methoxyethyl-5'-methylcytidine
  modified_base 4: mod_base = OTHER; note = 2'-O-methoxyethyl-thymidine
  modified_base 5: mod_base = OTHER; note = 2'-O-methoxyethyl-guanosine
  modified_base 6: mod_base = OTHER; note = 2'-O-methoxyethyl-adenosine
  modified_base 7: mod_base = OTHER; note = 2'-O-methoxyethyl-thymidine
  modified_base 8: mod_base = OTHER; note = 2'-O-methoxyethyl-guanosine
  modified_base 9: mod_base = OTHER; note = 2'-O-methoxyethyl-guanosine
  modified_base 10: mod_base = OTHER; note = 2'-O-methoxyethyl-adenosine
  modified_base 11: mod_base = OTHER; note = 2'-O-methoxyethyl-guanosine
  modified_base 12: mod_base = OTHER; note = 2'-O-methoxyethyl-adenosine
  modified_base 13: mod_base = OTHER; note = 2'-O-methoxyethyl-adenosine
  modified_base 14: mod_base = OTHER; note = 2'-O-methoxyethyl-adenosine
  modified_base 15: mod_base = OTHER; note = 2'-O-methoxyethyl-guanosine
  modified_base 16: mod_base = OTHER; note = 2'-O-methoxyethyl-adenosine
  modified_base 17: mod_base = OTHER; note = 2'-O-methoxyethyl-guanosine
  modified_base 18: mod_base = OTHER; note = 2'-O-methoxyethyl-5'-methylcytidine
aactgatggagaaagagc

SEQ ID NO: 376 - RNA, 18 nt, synthetic construct
  source 1..18: mol_type = other RNA
  modified_base 1: mod_base = OTHER; note = 2'-O-methoxyethyl-adenosine
  modified_base 2: mod_base = OTHER; note = 2'-O-methoxyethyl-adenosine
  modified_base 3: mod_base = OTHER; note = 2'-O-methoxyethyl-adenosine
  modified_base 4: mod_base = OTHER; note = 2'-O-methoxyethyl-5'-methylcytidine
  modified_base 5: mod_base = OTHER; note = 2'-O-methoxyethyl-thymidine
  modified_base 6: mod_base = OTHER; note = 2'-O-methoxyethyl-guanosine
  modified_base 7: mod_base = OTHER; note = 2'-O-methoxyethyl-adenosine
  modified_base 8: mod_base = OTHER; note = 2'-O-methoxyethyl-thymidine
  modified_base 9: mod_base = OTHER; note = 2'-O-methoxyethyl-guanosine
  modified_base 10: mod_base = OTHER; note = 2'-O-methoxyethyl-guanosine
  modified_base 11: mod_base = OTHER; note = 2'-O-methoxyethyl-adenosine
  modified_base 12: mod_base = OTHER; note = 2'-O-methoxyethyl-guanosine
  modified_base 13: mod_base = OTHER; note = 2'-O-methoxyethyl-adenosine
  modified_base 14: mod_base = OTHER; note = 2'-O-methoxyethyl-adenosine
  modified_base 15: mod_base = OTHER; note = 2'-O-methoxyethyl-adenosine
  modified_base 16: mod_base = OTHER; note = 2'-O-methoxyethyl-guanosine
  modified_base 17: mod_base = OTHER; note = 2'-O-methoxyethyl-adenosine
  modified_base 18: mod_base = OTHER; note = 2'-O-methoxyethyl-guanosine
aaactgatggagaaagag

SEQ ID NO: 377 - RNA, 18 nt, synthetic construct
  source 1..18: mol_type = other RNA
  modified_base 1: mod_base = OTHER; note = 2'-O-methoxyethyl-guanosine
  modified_base 2: mod_base = OTHER; note = 2'-O-methoxyethyl-adenosine
  modified_base 3: mod_base = OTHER; note = 2'-O-methoxyethyl-adenosine
  modified_base 4: mod_base = OTHER; note = 2'-O-methoxyethyl-adenosine
  modified_base 5: mod_base = OTHER; note = 2'-O-methoxyethyl-5'-methylcytidine
  modified_base 6: mod_base = OTHER; note = 2'-O-methoxyethyl-thymidine
  modified_base 7: mod_base = OTHER; note = 2'-O-methoxyethyl-guanosine
  modified_base 8: mod_base = OTHER; note = 2'-O-methoxyethyl-adenosine
  modified_base 9: mod_base = OTHER; note = 2'-O-methoxyethyl-thymidine
  modified_base 10: mod_base = OTHER; note = 2'-O-methoxyethyl-guanosine
  modified_base 11: mod_base = OTHER; note = 2'-O-methoxyethyl-guanosine
  modified_base 12: mod_base = OTHER; note = 2'-O-methoxyethyl-adenosine
  modified_base 13: mod_base = OTHER; note = 2'-O-methoxyethyl-guanosine
  modified_base 14: mod_base = OTHER; note = 2'-O-methoxyethyl-adenosine
  modified_base 15: mod_base = OTHER; note = 2'-O-methoxyethyl-adenosine
  modified_base 16: mod_base = OTHER; note = 2'-O-methoxyethyl-adenosine
  modified_base 17: mod_base = OTHER; note = 2'-O-methoxyethyl-guanosine
  modified_base 18: mod_base = OTHER; note = 2'-O-methoxyethyl-adenosine
gaaactgatggagaaaga

SEQ ID NO: 378 - RNA, 18 nt, synthetic construct
  source 1..18: mol_type = other RNA
  modified_base 1: mod_base = OTHER; note = 2'-O-methoxyethyl-adenosine
  modified_base 2: mod_base = OTHER; note = 2'-O-methoxyethyl-thymidine
  modified_base 3: mod_base = OTHER; note = 2'-O-methoxyethyl-guanosine
  modified_base 4: mod_base = OTHER; note = 2'-O-methoxyethyl-adenosine
  modified_base 5: mod_base = OTHER; note = 2'-O-methoxyethyl-adenosine
  modified_base 6: mod_base = OTHER; note = 2'-O-methoxyethyl-adenosine
  modified_base 7: mod_base = OTHER; note = 2'-O-methoxyethyl-5'-methylcytidine
  modified_base 8: mod_base = OTHER; note = 2'-O-methoxyethyl-thymidine
  modified_base 9: mod_base = OTHER; note = 2'-O-methoxyethyl-guanosine
  modified_base 10: mod_base = OTHER; note = 2'-O-methoxyethyl-adenosine
  modified_base 11: mod_base = OTHER; note = 2'-O-methoxyethyl-thymidine
  modified_base 12: mod_base = OTHER; note = 2'-O-methoxyethyl-guanosine
  modified_base 13: mod_base = OTHER; note = 2'-O-methoxyethyl-guanosine
  modified_base 14: mod_base = OTHER; note = 2'-O-methoxyethyl-adenosine
  modified_base 15: mod_base = OTHER; note = 2'-O-methoxyethyl-guanosine
  modified_base 16: mod_base = OTHER; note = 2'-O-methoxyethyl-adenosine
  modified_base 17: mod_base = OTHER; note = 2'-O-methoxyethyl-adenosine
  modified_base 18: mod_base = OTHER; note = 2'-O-methoxyethyl-adenosine
atgaaactgatggagaaa

SEQ ID NO: 379 - RNA, 18 nt, synthetic construct
  source 1..18: mol_type = other RNA
  modified_base 1: mod_base = OTHER; note = 2'-O-methoxyethyl-thymidine
  modified_base 2: mod_base = OTHER; note = 2'-O-methoxyethyl-adenosine
  modified_base 3: mod_base = OTHER; note = 2'-O-methoxyethyl-thymidine
  modified_base 4: mod_base = OTHER; note = 2'-O-methoxyethyl-guanosine
  modified_base 5: mod_base = OTHER; note = 2'-O-methoxyethyl-adenosine
  modified_base 6: mod_base = OTHER; note = 2'-O-methoxyethyl-adenosine
  modified_base 7: mod_base = OTHER; note = 2'-O-methoxyethyl-adenosine
  modified_base 8: mod_base = OTHER; note = 2'-O-methoxyethyl-5'-methylcytidine
  modified_base 9: mod_base = OTHER; note = 2'-O-methoxyethyl-thymidine
  modified_base 10: mod_base = OTHER; note = 2'-O-methoxyethyl-guanosine
  modified_base 11: mod_base = OTHER; note = 2'-O-methoxyethyl-adenosine
  modified_base 12: mod_base = OTHER; note = 2'-O-methoxyethyl-thymidine
  modified_base 13: mod_base = OTHER; note = 2'-O-methoxyethyl-guanosine
  modified_base 14: mod_base = OTHER; note = 2'-O-methoxyethyl-guanosine
  modified_base 15: mod_base = OTHER; note = 2'-O-methoxyethyl-adenosine
  modified_base 16: mod_base = OTHER; note = 2'-O-methoxyethyl-guanosine
  modified_base 17: mod_base = OTHER; note = 2'-O-methoxyethyl-adenosine
  modified_base 18: mod_base = OTHER; note = 2'-O-methoxyethyl-adenosine
tatgaaactgatggagaa

SEQ ID NO: 380 - RNA, 18 nt, synthetic construct
  source 1..18: mol_type = other RNA
  modified_base 1: mod_base = OTHER; note = 2'-O-methoxyethyl-5'-methylcytidine
  modified_base 2: mod_base = OTHER; note = 2'-O-methoxyethyl-thymidine
  modified_base 3: mod_base = OTHER; note = 2'-O-methoxyethyl-adenosine
  modified_base 4: mod_base = OTHER; note = 2'-O-methoxyethyl-thymidine
  modified_base 5: mod_base = OTHER; note = 2'-O-methoxyethyl-guanosine
  modified_base 6: mod_base = OTHER; note = 2'-O-methoxyethyl-adenosine
  modified_base 7: mod_base = OTHER; note = 2'-O-methoxyethyl-adenosine
  modified_base 8: mod_base = OTHER; note = 2'-O-methoxyethyl-adenosine
  modified_base 9: mod_base = OTHER; note = 2'-O-methoxyethyl-5'-methylcytidine
  modified_base 10: mod_base = OTHER; note = 2'-O-methoxyethyl-thymidine
  modified_base 11: mod_base = OTHER; note = 2'-O-methoxyethyl-guanosine
  modified_base 12: mod_base = OTHER; note = 2'-O-methoxyethyl-adenosine
  modified_base 13: mod_base = OTHER; note = 2'-O-methoxyethyl-thymidine
  modified_base 14: mod_base = OTHER; note = 2'-O-methoxyethyl-guanosine
  modified_base 15: mod_base = OTHER; note = 2'-O-methoxyethyl-guanosine
  modified_base 16: mod_base = OTHER; note = 2'-O-methoxyethyl-adenosine
  modified_base 17: mod_base = OTHER; note = 2'-O-methoxyethyl-guanosine
  modified_base 18: mod_base = OTHER; note = 2'-O-methoxyethyl-adenosine
ctatgaaactgatggaga

SEQ ID NO: 381 - RNA, 18 nt, synthetic construct
  source 1..18: mol_type = other RNA
  modified_base 1: mod_base = OTHER; note = 2'-O-methoxyethyl-guanosine
  modified_base 2: mod_base = OTHER; note = 2'-O-methoxyethyl-5'-methylcytidine
  modified_base 3: mod_base = OTHER; note = 2'-O-methoxyethyl-thymidine
  modified_base 4: mod_base = OTHER; note = 2'-O-methoxyethyl-adenosine
  modified_base 5: mod_base = OTHER; note = 2'-O-methoxyethyl-thymidine
  modified_base 6: mod_base = OTHER; note = 2'-O-methoxyethyl-guanosine
  modified_base 7: mod_base = OTHER; note = 2'-O-methoxyethyl-adenosine
  modified_base 8: mod_base = OTHER; note = 2'-O-methoxyethyl-adenosine
  modified_base 9: mod_base = OTHER; note = 2'-O-methoxyethyl-adenosine
  modified_base 10: mod_base = OTHER; note = 2'-O-methoxyethyl-5'-methylcytidine
  modified_base 11: mod_base = OTHER; note = 2'-O-methoxyethyl-thymidine
  modified_base 12: mod_base = OTHER; note = 2'-O-methoxyethyl-guanosine
  modified_base 13: mod_base = OTHER; note = 2'-O-methoxyethyl-adenosine
  modified_base 14: mod_base = OTHER; note = 2'-O-methoxyethyl-thymidine
  modified_base 15: mod_base = OTHER; note = 2'-O-methoxyethyl-guanosine
  modified_base 16: mod_base = OTHER; note = 2'-O-methoxyethyl-guanosine
  modified_base 17: mod_base = OTHER; note = 2'-O-methoxyethyl-adenosine
  modified_base 18: mod_base = OTHER; note = 2'-O-methoxyethyl-guanosine
gctatgaaactgatggag

SEQ ID NO: 382 - RNA, 18 nt, synthetic construct
  source 1..18: mol_type = other RNA
  modified_base 1: mod_base = OTHER; note = 2'-O-methoxyethyl-guanosine
  modified_base 2: mod_base = OTHER; note = 2'-O-methoxyethyl-guanosine
  modified_base 3: mod_base = OTHER; note = 2'-O-methoxyethyl-guanosine
  modified_base 4: mod_base = OTHER; note = 2'-O-methoxyethyl-5'-methylcytidine
  modified_base 5: mod_base = OTHER; note = 2'-O-methoxyethyl-thymidine
  modified_base 6: mod_base = OTHER; note = 2'-O-methoxyethyl-adenosine
  modified_base 7: mod_base = OTHER; note = 2'-O-methoxyethyl-thymidine
  modified_base 8: mod_base = OTHER; note = 2'-O-methoxyethyl-guanosine
  modified_base 9: mod_base = OTHER; note = 2'-O-methoxyethyl-adenosine
  modified_base 10: mod_base = OTHER; note = 2'-O-methoxyethyl-adenosine
  modified_base 11: mod_base = OTHER; note = 2'-O-methoxyethyl-adenosine
  modified_base 12: mod_base = OTHER; note = 2'-O-methoxyethyl-5'-methylcytidine
  modified_base 13: mod_base = OTHER; note = 2'-O-methoxyethyl-thymidine
  modified_base 14: mod_base = OTHER; note = 2'-O-methoxyethyl-guanosine
  modified_base 15: mod_base = OTHER; note = 2'-O-methoxyethyl-adenosine
  modified_base 16: mod_base = OTHER; note = 2'-O-methoxyethyl-thymidine
  modified_base 17: mod_base = OTHER; note = 2'-O-methoxyethyl-guanosine
  modified_base 18: mod_base = OTHER; note = 2'-O-methoxyethyl-guanosine
gggctatgaaactgatgg

SEQ ID NO: 383 - RNA, 18 nt, synthetic construct
  source 1..18: mol_type = other RNA
  modified_base 1: mod_base = OTHER; note = 2'-O-methoxyethyl-adenosine
  modified_base 2: mod_base = OTHER; note = 2'-O-methoxyethyl-guanosine
  modified_base 3: mod_base = OTHER; note = 2'-O-methoxyethyl-guanosine
  modified_base 4: mod_base = OTHER; note = 2'-O-methoxyethyl-guanosine
  modified_base 5: mod_base = OTHER; note = 2'-O-methoxyethyl-5'-methylcytidine
  modified_base 6: mod_base = OTHER; note = 2'-O-methoxyethyl-thymidine
  modified_base 7: mod_base = OTHER; note = 2'-O-methoxyethyl-adenosine
  modified_base 8: mod_base = OTHER; note = 2'-O-methoxyethyl-thymidine
  modified_base 9: mod_base = OTHER; note = 2'-O-methoxyethyl-guanosine
  modified_base 10: mod_base = OTHER; note = 2'-O-methoxyethyl-adenosine
  modified_base 11: mod_base = OTHER; note = 2'-O-methoxyethyl-adenosine
  modified_base 12: mod_base = OTHER; note = 2'-O-methoxyethyl-adenosine
  modified_base 13: mod_base = OTHER; note = 2'-O-methoxyethyl-5'-methylcytidine
  modified_base 14: mod_base = OTHER; note = 2'-O-methoxyethyl-thymidine
  modified_base 15: mod_base = OTHER; note = 2'-O-methoxyethyl-guanosine
  modified_base 16: mod_base = OTHER; note = 2'-O-methoxyethyl-adenosine
  modified_base 17: mod_base = OTHER; note = 2'-O-methoxyethyl-thymidine
  modified_base 18: mod_base = OTHER; note = 2'-O-methoxyethyl-guanosine
agggctatgaaactgatg

SEQ ID NO: 384 - RNA, 18 nt, synthetic construct
  source 1..18: mol_type = other RNA
  modified_base 1: mod_base = OTHER; note = 2'-O-methoxyethyl-5'-methylcytidine
  modified_base 2: mod_base = OTHER; note = 2'-O-methoxyethyl-adenosine
  modified_base 3: mod_base = OTHER; note = 2'-O-methoxyethyl-guanosine
  modified_base 4: mod_base = OTHER; note = 2'-O-methoxyethyl-guanosine
  modified_base 5: mod_base = OTHER; note = 2'-O-methoxyethyl-guanosine
  modified_base 6: mod_base = OTHER; note = 2'-O-methoxyethyl-5'-methylcytidine
  modified_base 7: mod_base = OTHER; note = 2'-O-methoxyethyl-thymidine
  modified_base 8: mod_base = OTHER; note = 2'-O-methoxyethyl-adenosine
  modified_base 9: mod_base = OTHER; note = 2'-O-methoxyethyl-thymidine
  modified_base 10: mod_base = OTHER; note = 2'-O-methoxyethyl-guanosine
  modified_base 11: mod_base = OTHER; note = 2'-O-methoxyethyl-adenosine
  modified_base 12: mod_base = OTHER; note = 2'-O-methoxyethyl-adenosine
  modified_base 13: mod_base = OTHER; note = 2'-O-methoxyethyl-adenosine
  modified_base 14: mod_base = OTHER; note = 2'-O-methoxyethyl-5'-methylcytidine
  modified_base 15: mod_base = OTHER; note = 2'-O-methoxyethyl-thymidine
  modified_base 16: mod_base = OTHER; note = 2'-O-methoxyethyl-guanosine
  modified_base 17: mod_base = OTHER; note = 2'-O-methoxyethyl-adenosine
  modified_base 18: mod_base = OTHER; note = 2'-O-methoxyethyl-thymidine
cagggctatgaaactgat

SEQ ID NO: 385 - RNA, 18 nt, synthetic construct
  source 1..18: mol_type = other RNA
  modified_base 1: mod_base = OTHER; note = 2'-O-methoxyethyl-5'-methylcytidine
  modified_base 2: mod_base = OTHER; note = 2'-O-methoxyethyl-5'-methylcytidine
  modified_base 3: mod_base = OTHER; note = 2'-O-methoxyethyl-adenosine
  modified_base 4: mod_base = OTHER; note = 2'-O-methoxyethyl-guanosine
  modified_base 5: mod_base = OTHER; note = 2'-O-methoxyethyl-guanosine
  modified_base 6: mod_base = OTHER; note = 2'-O-methoxyethyl-guanosine
  modified_base 7: mod_base = OTHER; note = 2'-O-methoxyethyl-5'-methylcytidine
  modified_base 8: mod_base = OTHER; note = 2'-O-methoxyethyl-thymidine
  modified_base 9: mod_base = OTHER; note = 2'-O-methoxyethyl-adenosine
  modified_base 10: mod_base = OTHER; note = 2'-O-methoxyethyl-thymidine
  modified_base 11: mod_base = OTHER; note = 2'-O-methoxyethyl-guanosine
  modified_base 12: mod_base = OTHER; note = 2'-O-methoxyethyl-adenosine
  modified_base 13: mod_base = OTHER; note = 2'-O-methoxyethyl-adenosine
  modified_base 14: mod_base = OTHER; note = 2'-O-methoxyethyl-adenosine
  modified_base 15: mod_base = OTHER; note = 2'-O-methoxyethyl-5'-methylcytidine
  modified_base 16: mod_base = OTHER; note = 2'-O-methoxyethyl-thymidine
  modified_base 17: mod_base = OTHER; note = 2'-O-methoxyethyl-guanosine
  modified_base 18: mod_base = OTHER; note = 2'-O-methoxyethyl-adenosine
ccagggctatgaaactga

SEQ ID NO: 386 - RNA, 22 nt, synthetic construct
  source 1..22: mol_type = other RNA
  modified_base 1: mod_base = OTHER; note = 2'-O-methoxyethyl-5'-methylcytidine
  modified_base 2: mod_base = OTHER; note = 2'-O-methoxyethyl-thymidine
  modified_base 3: mod_base = OTHER; note = 2'-O-methoxyethyl-guanosine
  modified_base 4: mod_base = OTHER; note = 2'-O-methoxyethyl-adenosine
  modified_base 5: mod_base = OTHER; note = 2'-O-methoxyethyl-thymidine
  modified_base 6: mod_base = OTHER; note = 2'-O-methoxyethyl-guanosine
  modified_base 7: mod_base = OTHER; note = 2'-O-methoxyethyl-guanosine
  modified_base 8: mod_base = OTHER; note = 2'-O-methoxyethyl-adenosine
  modified_base 9: mod_base = OTHER; note = 2'-O-methoxyethyl-guanosine
  modified_base 10: mod_base = OTHER; note = 2'-O-methoxyethyl-adenosine
  modified_base 11: mod_base = OTHER; note = 2'-O-methoxyethyl-adenosine
  modified_base 12: mod_base = OTHER; note = 2'-O-methoxyethyl-adenosine
  modified_base 13: mod_base = OTHER; note = 2'-O-methoxyethyl-guanosine
  modified_base 14: mod_base = OTHER; note = 2'-O-methoxyethyl-adenosine
  modified_base 15: mod_base = OTHER; note = 2'-O-methoxyethyl-guanosine
  modified_base 16: mod_base = OTHER; note = 2'-O-methoxyethyl-5'-methylcytidine
  modified_base 17: mod_base = OTHER; note = 2'-O-methoxyethyl-guanosine
  modified_base 18: mod_base = OTHER; note = 2'-O-methoxyethyl-guanosine
  modified_base 19: mod_base = OTHER; note = 2'-O-methoxyethyl-adenosine
  modified_base 20: mod_base = OTHER; note = 2'-O-methoxyethyl-adenosine
  modified_base 21: mod_base = OTHER; note = 2'-O-methoxyethyl-thymidine
  modified_base 22: mod_base = OTHER; note = 2'-O-methoxyethyl-5'-methylcytidine
ctgatggagaaagagcggaatc

SEQ ID NO: 387 - RNA, 20 nt, synthetic construct
  source 1..20: mol_type = other RNA
  modified_base 1: mod_base = OTHER; note = 2'-O-methoxyethyl-5'-methylcytidine
  modified_base 2: mod_base = OTHER; note = 2'-O-methoxyethyl-thymidine
  modified_base 3: mod_base = OTHER; note = 2'-O-methoxyethyl-guanosine
  modified_base 4: mod_base = OTHER; note = 2'-O-methoxyethyl-adenosine
  modified_base 5: mod_base = OTHER; note = 2'-O-methoxyethyl-thymidine
  modified_base 6: mod_base = OTHER; note = 2'-O-methoxyethyl-guanosine
  modified_base 7: mod_base = OTHER; note = 2'-O-methoxyethyl-guanosine
  modified_base 8: mod_base = OTHER; note = 2'-O-methoxyethyl-adenosine
  modified_base 9: mod_base = OTHER; note = 2'-O-methoxyethyl-guanosine
  modified_base 10: mod_base = OTHER; note = 2'-O-methoxyethyl-adenosine
  modified_base 11: mod_base = OTHER; note = 2'-O-methoxyethyl-adenosine
  modified_base 12: mod_base = OTHER; note = 2'-O-methoxyethyl-adenosine
  modified_base 13: mod_base = OTHER; note = 2'-O-methoxyethyl-guanosine
  modified_base 14: mod_base = OTHER; note = 2'-O-methoxyethyl-adenosine
  modified_base 15: mod_base = OTHER; note = 2'-O-methoxyethyl-guanosine
  modified_base 16: mod_base = OTHER; note = 2'-O-methoxyethyl-5'-methylcytidine
  modified_base 17: mod_base = OTHER; note = 2'-O-methoxyethyl-guanosine
  modified_base 18: mod_base = OTHER; note = 2'-O-methoxyethyl-guanosine
  modified_base 19: mod_base = OTHER; note = 2'-O-methoxyethyl-adenosine
  modified_base 20: mod_base = OTHER; note = 2'-O-methoxyethyl-adenosine
ctgatggagaaagagcggaa

SEQ ID NO: 388 - RNA, 22 nt, synthetic construct
  source 1..22: mol_type = other RNA
  modified_base 1: mod_base = OTHER; note = 2'-O-methoxyethyl-adenosine
  modified_base 2: mod_base = OTHER; note = 2'-O-methoxyethyl-adenosine
  modified_base 3: mod_base = OTHER; note = 2'-O-methoxyethyl-5'-methylcytidine
  modified_base 4: mod_base = OTHER; note = 2'-O-methoxyethyl-thymidine
  modified_base 5: mod_base = OTHER; note = 2'-O-methoxyethyl-guanosine
  modified_base 6: mod_base = OTHER; note = 2'-O-methoxyethyl-adenosine
  modified_base 7: mod_base = OTHER; note = 2'-O-methoxyethyl-thymidine
  modified_base 8: mod_base = OTHER; note = 2'-O-methoxyethyl-guanosine
  modified_base 9: mod_base = OTHER; note = 2'-O-methoxyethyl-guanosine
  modified_base 10: mod_base = OTHER; note = 2'-O-methoxyethyl-adenosine
  modified_base 11: mod_base = OTHER; note = 2'-O-methoxyethyl-guanosine
  modified_base 12: mod_base = OTHER; note = 2'-O-methoxyethyl-adenosine
  modified_base 13: mod_base = OTHER; note = 2'-O-methoxyethyl-adenosine
  modified_base 14: mod_base = OTHER; note = 2'-O-methoxyethyl-adenosine
  modified_base 15: mod_base = OTHER; note = 2'-O-methoxyethyl-guanosine
  modified_base 16: mod_base = OTHER; note = 2'-O-methoxyethyl-adenosine
  modified_base 17: mod_base = OTHER; note = 2'-O-methoxyethyl-guanosine
  modified_base 18: mod_base = OTHER; note = 2'-O-methoxyethyl-5'-methylcytidine
  modified_base 19: mod_base = OTHER; note = 2'-O-methoxyethyl-guanosine
  modified_base 20: mod_base = OTHER; note = 2'-O-methoxyethyl-guanosine
  modified_base 21: mod_base = OTHER; note = 2'-O-methoxyethyl-adenosine
  modified_base 22: mod_base = OTHER; note = 2'-O-methoxyethyl-adenosine
aactgatggagaaagagcggaa

SEQ ID NO: 389 - RNA, 20 nt, synthetic construct
  source 1..20: mol_type = other RNA
  modified_base 1: mod_base = OTHER; note = 2'-O-methoxyethyl-adenosine
  modified_base 2: mod_base = OTHER; note = 2'-O-methoxyethyl-adenosine
  modified_base 3: mod_base = OTHER; note = 2'-O-methoxyethyl-5'-methylcytidine
  modified_base 4: mod_base = OTHER; note = 2'-O-methoxyethyl-thymidine
  modified_base 5: mod_base = OTHER; note = 2'-O-methoxyethyl-guanosine
  modified_base 6: mod_base = OTHER; note = 2'-O-methoxyethyl-adenosine
  modified_base 7: mod_base = OTHER; note = 2'-O-methoxyethyl-thymidine
  modified_base 8: mod_base = OTHER; note = 2'-O-methoxyethyl-guanosine
  modified_base 9: mod_base = OTHER; note = 2'-O-methoxyethyl-guanosine
  modified_base 10: mod_base = OTHER; note = 2'-O-methoxyethyl-adenosine
  modified_base 11: mod_base = OTHER; note = 2'-O-methoxyethyl-guanosine
  modified_base 12: mod_base = OTHER; note = 2'-O-methoxyethyl-adenosine
  modified_base 13: mod_base = OTHER; note = 2'-O-methoxyethyl-adenosine
  modified_base 14: mod_base = OTHER; note = 2'-O-methoxyethyl-adenosine
  modified_base 15: mod_base = OTHER; note = 2'-O-methoxyethyl-guanosine
  modified_base 16: mod_base = OTHER; note = 2'-O-methoxyethyl-adenosine
  modified_base 17: mod_base = OTHER; note = 2'-O-methoxyethyl-guanosine
  modified_base 18: mod_base = OTHER; note = 2'-O-methoxyethyl-5'-methylcytidine
  modified_base 19: mod_base = OTHER; note = 2'-O-methoxyethyl-guanosine
  modified_base 20: mod_base = OTHER; note = 2'-O-methoxyethyl-guanosine
aactgatggagaaagagcgg

SEQ ID NO: 390 - RNA, 22 nt, synthetic construct
  source 1..22: mol_type = other RNA
  modified_base 1: mod_base = OTHER; note = 2'-O-methoxyethyl-guanosine
  modified_base 2: mod_base = OTHER; note = 2'-O-methoxyethyl-adenosine
  modified_base 3: mod_base = OTHER; note = 2'-O-methoxyethyl-adenosine
  modified_base 4: mod_base = OTHER; note = 2'-O-methoxyethyl-adenosine
  modified_base 5: mod_base = OTHER; note = 2'-O-methoxyethyl-5'-methylcytidine
  modified_base 6: mod_base = OTHER; note = 2'-O-methoxyethyl-thymidine
  modified_base 7: mod_base = OTHER; note = 2'-O-methoxyethyl-guanosine
  modified_base 8: mod_base = OTHER; note = 2'-O-methoxyethyl-adenosine
  modified_base 9: mod_base = OTHER; note = 2'-O-methoxyethyl-thymidine
  modified_base 10: mod_base = OTHER; note = 2'-O-methoxyethyl-guanosine
  modified_base 11: mod_base = OTHER; note = 2'-O-methoxyethyl-guanosine
  modified_base 12: mod_base = OTHER; note = 2'-O-methoxyethyl-adenosine
  modified_base 13: mod_base = OTHER; note = 2'-O-methoxyethyl-guanosine
  modified_base 14: mod_base = OTHER; note = 2'-O-methoxyethyl-adenosine
  modified_base 15: mod_base = OTHER; note = 2'-O-methoxyethyl-adenosine
  modified_base 16: mod_base = OTHER; note = 2'-O-methoxyethyl-adenosine
  modified_base 17: mod_base = OTHER; note = 2'-O-methoxyethyl-guanosine
  modified_base 18: mod_base = OTHER; note = 2'-O-methoxyethyl-adenosine
  modified_base 19: mod_base = OTHER; note = 2'-O-methoxyethyl-guanosine
  modified_base 20: mod_base = OTHER; note = 2'-O-methoxyethyl-5'-methylcytidine
  modified_base 21: mod_base = OTHER; note = 2'-O-methoxyethyl-guanosine
  modified_base 22: mod_base = OTHER; note = 2'-O-methoxyethyl-guanosine
gaaactgatggagaaagagcgg

SEQ ID NO: 391 - RNA, 22 nt, synthetic construct
  source 1..22: mol_type = other RNA
  modified_base 1: mod_base = OTHER; note = 2'-O-methoxyethyl-guanosine
  modified_base 2: mod_base = OTHER; note = 2'-O-methoxyethyl-guanosine
  modified_base 3: mod_base = OTHER; note = 2'-O-methoxyethyl-5'-methylcytidine
  modified_base 4: mod_base = OTHER; note = 2'-O-methoxyethyl-thymidine
  modified_base 5: mod_base = OTHER; note = 2'-O-methoxyethyl-adenosine
  modified_base 6: mod_base = OTHER; note = 2'-O-methoxyethyl-thymidine
  modified_base 7: mod_base = OTHER; note = 2'-O-methoxyethyl-guanosine
  modified_base 8: mod_base = OTHER; note = 2'-O-methoxyethyl-adenosine
  modified_base 9: mod_base = OTHER; note = 2'-O-methoxyethyl-adenosine
  modified_base 10: mod_base = OTHER; note = 2'-O-methoxyethyl-adenosine
  modified_base 11: mod_base = OTHER; note = 2'-O-methoxyethyl-5'-methylcytidine
  modified_base 12: mod_base = OTHER; note = 2'-O-methoxyethyl-thymidine
  modified_base 13: mod_base = OTHER; note = 2'-O-methoxyethyl-guanosine
  modified_base 14: mod_base = OTHER; note = 2'-O-methoxyethyl-adenosine
  modified_base 15: mod_base = OTHER; note = 2'-O-methoxyethyl-thymidine
  modified_base 16: mod_base = OTHER; note = 2'-O-methoxyethyl-guanosine
  modified_base 17: mod_base = OTHER; note = 2'-O-methoxyethyl-guanosine
  modified_base 18: mod_base = OTHER; note = 2'-O-methoxyethyl-adenosine
  modified_base 19: mod_base = OTHER; note = 2'-O-methoxyethyl-guanosine
  modified_base 20: mod_base = OTHER; note = 2'-O-methoxyethyl-adenosine
  modified_base 21: mod_base = OTHER; note = 2'-O-methoxyethyl-adenosine
  modified_base 22: mod_base = OTHER; note = 2'-O-methoxyethyl-adenosine
ggctatgaaactgatggagaaa

SEQ ID NO: 392 - RNA, 20 nt, synthetic construct
  source 1..20: mol_type = other RNA
  modified_base 1: mod_base = OTHER; note = 2'-O-methoxyethyl-guanosine
  modified_base 2: mod_base = OTHER; note = 2'-O-methoxyethyl-guanosine
  modified_base 3: mod_base = OTHER; note = 2'-O-methoxyethyl-5'-methylcytidine
  modified_base 4: mod_base = OTHER; note = 2'-O-methoxyethyl-thymidine
  modified_base 5: mod_base = OTHER; note = 2'-O-methoxyethyl-adenosine
  modified_base 6: mod_base = OTHER; note = 2'-O-methoxyethyl-thymidine
  modified_base 7: mod_base = OTHER; note = 2'-O-methoxyethyl-guanosine
  modified_base 8: mod_base = OTHER; note = 2'-O-methoxyethyl-adenosine
  modified_base 9: mod_base = OTHER; note = 2'-O-methoxyethyl-adenosine
  modified_base 10: mod_base = OTHER; note = 2'-O-methoxyethyl-adenosine
  modified_base 11: mod_base = OTHER; note = 2'-O-methoxyethyl-5'-methylcytidine
  modified_base 12: mod_base = OTHER; note = 2'-O-methoxyethyl-thymidine
  modified_base 13: mod_base = OTHER; note = 2'-O-methoxyethyl-guanosine
  modified_base 14: mod_base = OTHER; note = 2'-O-methoxyethyl-adenosine
  modified_base 15: mod_base = OTHER; note = 2'-O-methoxyethyl-thymidine
  modified_base 16: mod_base = OTHER; note = 2'-O-methoxyethyl-guanosine
  modified_base 17: mod_base = OTHER; note = 2'-O-methoxyethyl-guanosine
  modified_base 18: mod_base = OTHER; note = 2'-O-methoxyethyl-adenosine
  modified_base 19: mod_base = OTHER; note = 2'-O-methoxyethyl-guanosine
  modified_base 20: mod_base = OTHER; note = 2'-O-methoxyethyl-adenosine
ggctatgaaactgatggaga

SEQ ID NO: 393 - RNA, 22 nt, synthetic construct
  source 1..22: mol_type = other RNA
  modified_base 1: mod_base = OTHER; note = 2'-O-methoxyethyl-adenosine
  modified_base 2: mod_base = OTHER; note = 2'-O-methoxyethyl-guanosine
  modified_base 3: mod_base = OTHER; note = 2'-O-methoxyethyl-guanosine
  modified_base 4: mod_base = OTHER; note = 2'-O-methoxyethyl-guanosine
  modified_base 5: mod_base = OTHER; note = 2'-O-methoxyethyl-5'-methylcytidine
  modified_base 6: mod_base = OTHER; note = 2'-O-methoxyethyl-thymidine
  modified_base 7: mod_base = OTHER; note = 2'-O-methoxyethyl-adenosine
  modified_base 8: mod_base = OTHER; note = 2'-O-methoxyethyl-thymidine
  modified_base 9: mod_base = OTHER; note = 2'-O-methoxyethyl-guanosine
  modified_base 10: mod_base = OTHER; note = 2'-O-methoxyethyl-adenosine
  modified_base 11: mod_base = OTHER; note = 2'-O-methoxyethyl-adenosine
  modified_base 12: mod_base = OTHER; note = 2'-O-methoxyethyl-adenosine
  modified_base 13: mod_base = OTHER; note = 2'-O-methoxyethyl-5'-methylcytidine
  modified_base 14: mod_base = OTHER; note = 2'-O-methoxyethyl-thymidine
  modified_base 15: mod_base = OTHER; note = 2'-O-methoxyethyl-guanosine
  modified_base 16: mod_base = OTHER; note = 2'-O-methoxyethyl-adenosine
  modified_base 17: mod_base = OTHER; note = 2'-O-methoxyethyl-thymidine
  modified_base 18: mod_base = OTHER; note = 2'-O-methoxyethyl-guanosine
  modified_base 19: mod_base = OTHER; note = 2'-O-methoxyethyl-guanosine
  modified_base 20: mod_base = OTHER; note = 2'-O-methoxyethyl-adenosine
  modified_base 21: mod_base = OTHER; note = 2'-O-methoxyethyl-guanosine
  modified_base 22: mod_base = OTHER; note = 2'-O-methoxyethyl-adenosine
agggctatgaaactgatggaga

SEQ ID NO: 394 - RNA, 20 nt, synthetic construct
  source 1..20: mol_type = other RNA
  modified_base 1: mod_base = OTHER; note = 2'-O-methoxyethyl-adenosine
  modified_base 2: mod_base = OTHER; note = 2'-O-methoxyethyl-guanosine
  modified_base 3: mod_base = OTHER; note = 2'-O-methoxyethyl-guanosine
  modified_base 4: mod_base = OTHER; note = 2'-O-methoxyethyl-guanosine
  modified_base 5: mod_base = OTHER; note = 2'-O-methoxyethyl-5'-methylcytidine
  modified_base 6: mod_base = OTHER; note = 2'-O-methoxyethyl-thymidine
  modified_base 7: mod_base = OTHER; note = 2'-O-methoxyethyl-adenosine
  modified_base 8: mod_base = OTHER; note = 2'-O-methoxyethyl-thymidine
  modified_base 9: mod_base = OTHER; note = 2'-O-methoxyethyl-guanosine
  modified_base 10: mod_base = OTHER; note = 2'-O-methoxyethyl-adenosine
  modified_base 11: mod_base = OTHER; note = 2'-O-methoxyethyl-adenosine
  modified_base 12: mod_base = OTHER; note = 2'-O-methoxyethyl-adenosine
  modified_base 13: mod_base = OTHER; note = 2'-O-methoxyethyl-5'-methylcytidine
  modified_base 14: mod_base = OTHER; note = 2'-O-methoxyethyl-thymidine
  modified_base 15: mod_base = OTHER; note = 2'-O-methoxyethyl-guanosine
  modified_base 16: mod_base = OTHER; note = 2'-O-methoxyethyl-adenosine
  modified_base 17: mod_base = OTHER; note = 2'-O-methoxyethyl-thymidine
  modified_base 18: mod_base = OTHER; note = 2'-O-methoxyethyl-guanosine
  modified_base 19: mod_base = OTHER; note = 2'-O-methoxyethyl-guanosine
  modified_base 20: mod_base = OTHER; note = 2'-O-methoxyethyl-adenosine
agggctatgaaactgatgga

SEQ ID NO: 395 - RNA, 22 nt, synthetic construct
  source 1..22: mol_type = other RNA
  modified_base 1: mod_base = OTHER; note = 2'-O-methoxyethyl-5'-methylcytidine
  modified_base 2: mod_base = OTHER; note = 2'-O-methoxyethyl-5'-methylcytidine
  modified_base 3: mod_base = OTHER; note = 2'-O-methoxyethyl-adenosine
  modified_base 4: mod_base = OTHER; note = 2'-O-methoxyethyl-guanosine
  modified_base 5: mod_base = OTHER; note = 2'-O-methoxyethyl-guanosine
  modified_base 6: mod_base = OTHER; note = 2'-O-methoxyethyl-guanosine
  modified_base 7: mod_base = OTHER; note = 2'-O-methoxyethyl-5'-methylcytidine
  modified_base 8: mod_base = OTHER; note = 2'-O-methoxyethyl-thymidine
  modified_base 9: mod_base = OTHER; note = 2'-O-methoxyethyl-adenosine
  modified_base 10: mod_base = OTHER; note = 2'-O-methoxyethyl-thymidine
  modified_base 11: mod_base = OTHER; note = 2'-O-methoxyethyl-guanosine
  modified_base 12: mod_base = OTHER; note = 2'-O-methoxyethyl-adenosine
  modified_base 13: mod_base = OTHER; note = 2'-O-methoxyethyl-adenosine
  modified_base 14: mod_base = OTHER; note = 2'-O-methoxyethyl-adenosine
  modified_base 15: mod_base = OTHER; note = 2'-O-methoxyethyl-5'-methylcytidine
  modified_base 16: mod_base = OTHER; note = 2'-O-methoxyethyl-thymidine
  modified_base 17: mod_base = OTHER; note = 2'-O-methoxyethyl-guanosine
  modified_base 18: mod_base = OTHER; note = 2'-O-methoxyethyl-adenosine
  modified_base 19: mod_base = OTHER; note = 2'-O-methoxyethyl-thymidine
  modified_base 20: mod_base = OTHER; note = 2'-O-methoxyethyl-guanosine
  modified_base 21: mod_base = OTHER; note = 2'-O-methoxyethyl-guanosine
  modified_base 22: mod_base = OTHER; note = 2'-O-methoxyethyl-adenosine
ccagggctatgaaactgatgga

SEQ ID NO: 396 - RNA, 18 nt, synthetic construct
  source 1..18: mol_type = other RNA
  modified_base 1: mod_base = OTHER; note = 2'-O-methoxyethyl-thymidine
  modified_base 2: mod_base = OTHER; note = 2'-O-methoxyethyl-thymidine
  modified_base 3: mod_base = OTHER; note = 2'-O-methoxyethyl-5'-methylcytidine
  modified_base 4: mod_base = OTHER; note = 2'-O-methoxyethyl-thymidine
  modified_base 5: mod_base = OTHER; note = 2'-O-methoxyethyl-thymidine
  modified_base 6: mod_base = OTHER; note = 2'-O-methoxyethyl-adenosine
  modified_base 7: mod_base = OTHER; note = 2'-O-methoxyethyl-5'-methylcytidine
  modified_base 8: mod_base = OTHER; note = 2'-O-methoxyethyl-5'-methylcytidine
  modified_base 9: mod_base = OTHER; note = 2'-O-methoxyethyl-5'-methylcytidine
  modified_base 10: mod_base = OTHER; note = 2'-O-methoxyethyl-adenosine
  modified_base 11: mod_base = OTHER; note = 2'-O-methoxyethyl-thymidine
  modified_base 12: mod_base = OTHER; note = 2'-O-methoxyethyl-thymidine
  modified_base 13: mod_base = OTHER; note = 2'-O-methoxyethyl-thymidine
  modified_base 14: mod_base = OTHER; note = 2'-O-methoxyethyl-adenosine
  modified_base 15: mod_base = OTHER; note = 2'-O-methoxyethyl-adenosine
  modified_base 16: mod_base = OTHER; note = 2'-O-methoxyethyl-thymidine
  modified_base 17: mod_base = OTHER; note = 2'-O-methoxyethyl-thymidine
  modified_base 18: mod_base = OTHER; note = 2'-O-methoxyethyl-adenosine
ttcttacccatttaatta

SEQ ID NO: 397 - RNA, 18 nt, synthetic construct
  source 1..18: mol_type = other RNA
  modified_base 1: mod_base = OTHER; note = 2'-O-methoxyethyl-thymidine
  modified_base 2: mod_base = OTHER; note = 2'-O-methoxyethyl-guanosine
  modified_base 3: mod_base = OTHER; note = 2'-O-methoxyethyl-5'-methylcytidine
  modified_base 4: mod_base = OTHER; note = 2'-O-methoxyethyl-thymidine
  modified_base 5: mod_base = OTHER; note = 2'-O-methoxyethyl-thymidine
  modified_base 6: mod_base = OTHER; note = 2'-O-methoxyethyl-5'-methylcytidine
  modified_base 7: mod_base = OTHER; note = 2'-O-methoxyethyl-thymidine
  modified_base 8: mod_base = OTHER; note = 2'-O-methoxyethyl-thymidine
  modified_base 9: mod_base = OTHER; note = 2'-O-methoxyethyl-adenosine
  modified_base 10: mod_base = OTHER; note = 2'-O-methoxyethyl-5'-methylcytidine
  modified_base 11: mod_base = OTHER; note = 2'-O-methoxyethyl-5'-methylcytidine
  modified_base 12: mod_base = OTHER; note = 2'-O-methoxyethyl-5'-methylcytidine
  modified_base 13: mod_base = OTHER; note = 2'-O-methoxyethyl-adenosine
  modified_base 14: mod_base = OTHER; note = 2'-O-methoxyethyl-thymidine
  modified_base 15: mod_base = OTHER; note = 2'-O-methoxyethyl-thymidine
  modified_base 16: mod_base = OTHER; note = 2'-O-methoxyethyl-thymidine
  modified_base 17: mod_base = OTHER; note = 2'-O-methoxyethyl-adenosine
  modified_base 18: mod_base = OTHER; note = 2'-O-methoxyethyl-adenosine
tgcttcttacccatttaa

SEQ ID NO: 398 - RNA, 18 nt, synthetic construct
  source 1..18: mol_type = other RNA
  modified_base 1: mod_base = OTHER; note = 2'-O-methoxyethyl-thymidine
  modified_base 2: mod_base = OTHER; note = 2'-O-methoxyethyl-adenosine
  modified_base 3: mod_base = OTHER; note = 2'-O-methoxyethyl-adenosine
  modified_base 4: mod_base = OTHER; note = 2'-O-methoxyethyl-thymidine
  modified_base 5: mod_base = OTHER; note = 2'-O-methoxyethyl-guanosine
  modified_base 6: mod_base = OTHER; note = 2'-O-methoxyethyl-5'-methylcytidine
  modified_base 7: mod_base = OTHER; note = 2'-O-methoxyethyl-thymidine
  modified_base 8: mod_base = OTHER; note = 2'-O-methoxyethyl-thymidine
  modified_base 9: mod_base = OTHER; note = 2'-O-methoxyethyl-5'-methylcytidine
  modified_base 10: mod_base = OTHER; note = 2'-O-methoxyethyl-thymidine
  modified_base 11: mod_base = OTHER; note = 2'-O-methoxyethyl-thymidine
  modified_base 12: mod_base = OTHER; note = 2'-O-methoxyethyl-adenosine
  modified_base 13: mod_base = OTHER; note = 2'-O-methoxyethyl-5'-methylcytidine
  modified_base 14: mod_base = OTHER; note = 2'-O-methoxyethyl-5'-methylcytidine
  modified_base 15: mod_base = OTHER; note = 2'-O-methoxyethyl-5'-methylcytidine
  modified_base 16: mod_base = OTHER; note = 2'-O-methoxyethyl-adenosine
  modified_base 17: mod_base = OTHER; note = 2'-O-methoxyethyl-thymidine
  modified_base 18: mod_base = OTHER; note = 2'-O-methoxyethyl-thymidine
taatgcttcttacccatt

SEQ ID NO: 399 - RNA, 18 nt, synthetic construct
  source 1..18: mol_type = other RNA
  modified_base 1: mod_base = OTHER; note = 2'-O-methoxyethyl-adenosine
  modified_base 2: mod_base = OTHER; note = 2'-O-methoxyethyl-guanosine
  modified_base 3: mod_base = OTHER; note = 2'-O-methoxyethyl-adenosine
  modified_base 4: mod_base = OTHER; note = 2'-O-methoxyethyl-thymidine
  modified_base 5: mod_base = OTHER; note = 2'-O-methoxyethyl-adenosine
  modified_base 6: mod_base = OTHER; note = 2'-O-methoxyethyl-adenosine
  modified_base 7: mod_base = OTHER; note = 2'-O-methoxyethyl-thymidine
  modified_base 8: mod_base = OTHER; note = 2'-O-methoxyethyl-guanosine
  modified_base 9: mod_base = OTHER; note = 2'-O-methoxyethyl-5'-methylcytidine
  modified_base 10: mod_base = OTHER; note = 2'-O-methoxyethyl-thymidine
  modified_base 11: mod_base = OTHER; note = 2'-O-methoxyethyl-thymidine
  modified_base 12: mod_base = OTHER; note = 2'-O-methoxyethyl-5'-methylcytidine
  modified_base 13: mod_base = OTHER; note = 2'-O-methoxyethyl-thymidine
  modified_base 14: mod_base = OTHER; note = 2'-O-methoxyethyl-thymidine
  modified_base 15: mod_base = OTHER; note = 2'-O-methoxyethyl-adenosine
  modified_base 16: mod_base = OTHER; note = 2'-O-methoxyethyl-5'-methylcytidine
  modified_base 17: mod_base = OTHER; note = 2'-O-methoxyethyl-5'-methylcytidine
  modified_base 18: mod_base = OTHER; note = 2'-O-methoxyethyl-5'-methylcytidine
agataatgcttcttaccc

SEQ ID NO: 400 - RNA, 18 nt, synthetic construct
  source 1..18: mol_type = other RNA
  modified_base 1: mod_base = OTHER; note = 2'-O-methoxyethyl-5'-methylcytidine
  modified_base 2: mod_base = OTHER; note = 2'-O-methoxyethyl-adenosine
  modified_base 3: mod_base = OTHER; note = 2'-O-methoxyethyl-guanosine
  modified_base 4: mod_base = OTHER; note = 2'-O-methoxyethyl-adenosine
  modified_base 5: mod_base = OTHER; note = 2'-O-methoxyethyl-thymidine
  modified_base 6: mod_base = OTHER; note = 2'-O-methoxyethyl-adenosine
  modified_base 7: mod_base = OTHER; note = 2'-O-methoxyethyl-adenosine
  modified_base 8: mod_base = OTHER; note = 2'-O-methoxyethyl-thymidine
  modified_base 9: mod_base = OTHER; note = 2'-O-methoxyethyl-guanosine
  modified_base 10: mod_base = OTHER; note = 2'-O-methoxyethyl-5'-methylcytidine
  modified_base 11: mod_base = OTHER; note = 2'-O-methoxyethyl-thymidine
  modified_base 12: mod_base = OTHER; note = 2'-O-methoxyethyl-thymidine
  modified_base 13: mod_base = OTHER; note = 2'-O-methoxyethyl-5'-methylcytidine
  modified_base 14: mod_base = OTHER; note = 2'-O-methoxyethyl-thymidine
  modified_base 15: mod_base = OTHER; note = 2'-O-methoxyethyl-thymidine
  modified_base 16: mod_base = OTHER; note = 2'-O-methoxyethyl-adenosine
  modified_base 17: mod_base = OTHER; note = 2'-O-methoxyethyl-5'-methylcytidine
  modified_base 18: mod_base = OTHER; note = 2'-O-methoxyethyl-5'-methylcytidine
cagataatgcttcttacc

SEQ ID NO: 401 - RNA, 18 nt, synthetic construct
  source 1..18: mol_type = other RNA
  modified_base 1: mod_base = OTHER; note = 2'-O-methoxyethyl-5'-methylcytidine
  modified_base 2: mod_base = OTHER; note = 2'-O-methoxyethyl-5'-methylcytidine
  modified_base 3: mod_base = OTHER; note = 2'-O-methoxyethyl-5'-methylcytidine
  modified_base 4: mod_base = OTHER; note = 2'-O-methoxyethyl-thymidine
  modified_base 5: mod_base = OTHER; note = 2'-O-methoxyethyl-thymidine
  modified_base 6: mod_base = OTHER; note = 2'-O-methoxyethyl-5'-methylcytidine
  modified_base 7: mod_base = OTHER; note = 2'-O-methoxyethyl-adenosine
  modified_base 8: mod_base = OTHER; note = 2'-O-methoxyethyl-guanosine
  modified_base 9: mod_base = OTHER; note = 2'-O-methoxyethyl-adenosine
  modified_base 10: mod_base = OTHER; note = 2'-O-methoxyethyl-thymidine
  modified_base 11: mod_base = OTHER; note = 2'-O-methoxyethyl-adenosine
  modified_base 12: mod_base = OTHER; note = 2'-O-methoxyethyl-adenosine
  modified_base 13: mod_base = OTHER; note = 2'-O-methoxyethyl-thymidine
  modified_base 14: mod_base = OTHER; note = 2'-O-methoxyethyl-guanosine
  modified_base 15: mod_base = OTHER; note = 2'-O-methoxyethyl-5'-methylcytidine
  modified_base 16: mod_base = OTHER; note = 2'-O-methoxyethyl-thymidine
  modified_base 17: mod_base = OTHER; note = 2'-O-methoxyethyl-thymidine
  modified_base 18: mod_base = OTHER; note = 2'-O-methoxyethyl-5'-methylcytidine
cccttcagataatgcttc

SEQ ID NO: 402 - RNA, 18 nt, synthetic construct
  source 1..18: mol_type = other RNA
  modified_base 1: mod_base = OTHER; note = 2'-O-methoxyethyl-5'-methylcytidine
  modified_base 2: mod_base = OTHER; note = 2'-O-methoxyethyl-thymidine
  modified_base 3: mod_base = OTHER; note = 2'-O-methoxyethyl-adenosine
  modified_base 4: mod_base = OTHER; note = 2'-O-methoxyethyl-5'-methylcytidine
  modified_base 5: mod_base = OTHER; note = 2'-O-methoxyethyl-thymidine
  modified_base 6: mod_base = OTHER; note = 2'-O-methoxyethyl-5'-methylcytidine
  modified_base 7: mod_base = OTHER; note = 2'-O-methoxyethyl-5'-methylcytidine
  modified_base 8: mod_base = OTHER; note = 2'-O-methoxyethyl-5'-methylcytidine
  modified_base 9: mod_base = OTHER; note = 2'-O-methoxyethyl-thymidine
  modified_base 10: mod_base = OTHER; note = 2'-O-methoxyethyl-thymidine
  modified_base 11: mod_base = OTHER; note = 2'-O-methoxyethyl-5'-methylcytidine
  modified_base 12: mod_base = OTHER; note = 2'-O-methoxyethyl-adenosine
  modified_base 13: mod_base = OTHER; note = 2'-O-methoxyethyl-guanosine
  modified_base 14: mod_base = OTHER; note = 2'-O-methoxyethyl-adenosine
  modified_base 15: mod_base = OTHER; note = 2'-O-methoxyethyl-thymidine
  modified_base 16: mod_base = OTHER; note = 2'-O-methoxyethyl-adenosine
  modified_base 17: mod_base = OTHER; note = 2'-O-methoxyethyl-adenosine
  modified_base 18: mod_base = OTHER; note = 2'-O-methoxyethyl-thymidine
ctactcccttcagataat

SEQ ID NO: 403 - RNA, 18 nt, synthetic construct
  source 1..18: mol_type = other RNA
  modified_base 1: mod_base = OTHER; note = 2'-O-methoxyethyl-adenosine
  modified_base 2: mod_base = OTHER; note = 2'-O-methoxyethyl-guanosine
  modified_base 3: mod_base = OTHER; note = 2'-O-methoxyethyl-5'-methylcytidine
  modified_base 4: mod_base = OTHER; note = 2'-O-methoxyethyl-thymidine
  modified_base 5: mod_base = OTHER; note = 2'-O-methoxyethyl-5'-methylcytidine
  modified_base 6: mod_base = OTHER; note = 2'-O-methoxyethyl-5'-methylcytidine
  modified_base 7: mod_base = OTHER; note = 2'-O-methoxyethyl-thymidine
  modified_base 8: mod_base = OTHER; note = 2'-O-methoxyethyl-adenosine
  modified_base 9: mod_base = OTHER; note = 2'-O-methoxyethyl-5'-methylcytidine
  modified_base 10: mod_base = OTHER; note = 2'-O-methoxyethyl-thymidine
  modified_base 11: mod_base = OTHER; note = 2'-O-methoxyethyl-5'-methylcytidine
  modified_base 12: mod_base = OTHER; note = 2'-O-methoxyethyl-5'-methylcytidine
  modified_base 13: mod_base = OTHER; note = 2'-O-methoxyethyl-5'-methylcytidine
  modified_base 14: mod_base = OTHER; note = 2'-O-methoxyethyl-thymidine
  modified_base 15: mod_base = OTHER; note = 2'-O-methoxyethyl-thymidine
  modified_base 16: mod_base = OTHER; note = 2'-O-methoxyethyl-5'-methylcytidine
  modified_base 17: mod_base = OTHER; note = 2'-O-methoxyethyl-adenosine
  modified_base 18: mod_base = OTHER; note = 2'-O-methoxyethyl-guanosine
agctcctactcccttcag

SEQ ID NO: 404 - RNA, 18 nt, synthetic construct
  source 1..18: mol_type = other RNA
  modified_base 1: mod_base = OTHER; note = 2'-O-methoxyethyl-thymidine
  modified_base 2: mod_base = OTHER; note = 2'-O-methoxyethyl-thymidine
  modified_base 3: mod_base = OTHER; note = 2'-O-methoxyethyl-5'-methylcytidine
  modified_base 4: mod_base = OTHER; note = 2'-O-methoxyethyl-adenosine
  modified_base 5: mod_base = OTHER; note = 2'-O-methoxyethyl-5'-methylcytidine
  modified_base 6: mod_base = OTHER; note = 2'-O-methoxyethyl-adenosine
  modified_base 7: mod_base = OTHER; note = 2'-O-methoxyethyl-guanosine
  modified_base 8: mod_base = OTHER; note = 2'-O-methoxyethyl-5'-methylcytidine
  modified_base 9: mod_base = OTHER; note = 2'-O-methoxyethyl-thymidine
  modified_base 10: mod_base = OTHER; note = 2'-O-methoxyethyl-5'-methylcytidine
  modified_base 11: mod_base = OTHER; note = 2'-O-methoxyethyl-5'-methylcytidine
  modified_base 12: mod_base = OTHER; note = 2'-O-methoxyethyl-thymidine
  modified_base 13: mod_base = OTHER; note = 2'-O-methoxyethyl-adenosine
  modified_base 14: mod_base = OTHER; note = 2'-O-methoxyethyl-5'-methylcytidine
  modified_base 15: mod_base = OTHER; note = 2'-O-methoxyethyl-thymidine
  modified_base 16: mod_base = OTHER; note = 2'-O-methoxyethyl-5'-methylcytidine
  modified_base 17: mod_base = OTHER; note = 2'-O-methoxyethyl-5'-methylcytidine
  modified_base 18: mod_base = OTHER; note = 2'-O-methoxyethyl-5'-methylcytidine
ttcacagctcctactccc

SEQ ID NO: 405 - RNA, 18 nt, synthetic construct
  source 1..18: mol_type = other RNA
  modified_base 1: mod_base = OTHER; note = 2'-O-methoxyethyl-thymidine
  modified_base 2: mod_base = OTHER; note = 2'-O-methoxyethyl-adenosine
  modified_base 3: mod_base = OTHER; note = 2'-O-methoxyethyl-adenosine
  modified_base 4: mod_base = OTHER; note = 2'-O-methoxyethyl-adenosine
  modified_base 5: mod_base = OTHER; note = 2'-O-methoxyethyl-adenosine
  modified_base 6: mod_base = OTHER; note = 2'-O-methoxyethyl-thymidine
  modified_base 7: mod_base = OTHER; note = 2'-O-methoxyethyl-thymidine
  modified_base 8: mod_base = OTHER; note = 2'-O-methoxyethyl-5'-methylcytidine
  modified_base 9: mod_base = OTHER; note = 2'-O-methoxyethyl-adenosine
  modified_base 10: mod_base = OTHER; note = 2'-O-methoxyethyl-5'-methylcytidine
  modified_base 11: mod_base = OTHER; note = 2'-O-methoxyethyl-adenosine
  modified_base 12: mod_base = OTHER; note = 2'-O-methoxyethyl-guanosine
  modified_base 13: mod_base = OTHER; note = 2'-O-methoxyethyl-5'-methylcytidine
  modified_base 14: mod_base = OTHER; note = 2'-O-methoxyethyl-thymidine
  modified_base 15: mod_base = OTHER; note = 2'-O-methoxyethyl-5'-methylcytidine
  modified_base 16: mod_base = OTHER; note = 2'-O-methoxyethyl-5'-methylcytidine
  modified_base 17: mod_base = OTHER; note = 2'-O-methoxyethyl-thymidine
  modified_base 18: mod_base = OTHER; note = 2'-O-methoxyethyl-adenosine
taaaattcacagctccta

SEQ ID NO: 406 - RNA, 18 nt, synthetic construct
  source 1..18: mol_type = other RNA
  modified_base 1: mod_base = OTHER; note = 2'-O-methoxyethyl-adenosine
  modified_base 2: mod_base = OTHER; note = 2'-O-methoxyethyl-adenosine
  modified_base 3: mod_base = OTHER; note = 2'-O-methoxyethyl-adenosine
  modified_base 4: mod_base = OTHER; note = 2'-O-methoxyethyl-thymidine
  modified_base 5: mod_base = OTHER; note = 2'-O-methoxyethyl-5'-methylcytidine
  modified_base 6: mod_base = OTHER; note = 2'-O-methoxyethyl-thymidine
  modified_base 7: mod_base = OTHER; note = 2'-O-methoxyethyl-adenosine
  modified_base 8: mod_base = OTHER; note = 2'-O-methoxyethyl-adenosine
  modified_base 9: mod_base = OTHER; note = 2'-O-methoxyethyl-adenosine
  modified_base 10: mod_base = OTHER; note = 2'-O-methoxyethyl-adenosine
  modified_base 11: mod_base = OTHER; note = 2'-O-methoxyethyl-thymidine
  modified_base 12: mod_base = OTHER; note = 2'-O-methoxyethyl-thymidine
  modified_base 13: mod_base = OTHER; note = 2'-O-methoxyethyl-5'-methylcytidine
  modified_base 14: mod_base = OTHER; note = 2'-O-methoxyethyl-adenosine
  modified_base 15: mod_base = OTHER; note = 2'-O-methoxyethyl-5'-methylcytidine
  modified_base 16: mod_base = OTHER; note = 2'-O-methoxyethyl-adenosine
  modified_base 17: mod_base = OTHER; note = 2'-O-methoxyethyl-guanosine
  modified_base 18: mod_base = OTHER; note = 2'-O-methoxyethyl-5'-methylcytidine
aaatctaaaattcacagc

SEQ ID NO: 407 - RNA, 18 nt, synthetic construct
  source 1..18: mol_type = other RNA
  modified_base 1: mod_base = OTHER; note = 2'-O-methoxyethyl-guanosine
  modified_base 2: mod_base = OTHER; note = 2'-O-methoxyethyl-adenosine
  modified_base 3: mod_base = OTHER; note = 2'-O-methoxyethyl-adenosine
  modified_base 4: mod_base = OTHER; note = 2'-O-methoxyethyl-thymidine
  modified_base 5: mod_base = OTHER; note = 2'-O-methoxyethyl-adenosine
  modified_base 6: mod_base = OTHER; note = 2'-O-methoxyethyl-adenosine
  modified_base 7: mod_base = OTHER; note = 2'-O-methoxyethyl-adenosine
  modified_base 8: mod_base = OTHER; note = 2'-O-methoxyethyl-adenosine
  modified_base 9: mod_base = OTHER; note = 2'-O-methoxyethyl-thymidine
  modified_base 10: mod_base = OTHER; note = 2'-O-methoxyethyl-5'-methylcytidine
  modified_base 11: mod_base = OTHER; note = 2'-O-methoxyethyl-thymidine
  modified_base 12: mod_base = OTHER; note = 2'-O-methoxyethyl-adenosine
  modified_base 13: mod_base = OTHER; note = 2'-O-methoxyethyl-adenosine
  modified_base 14: mod_base = OTHER; note = 2'-O-methoxyethyl-adenosine
  modified_base 15: mod_base = OTHER; note = 2'-O-methoxyethyl-adenosine
  modified_base 16: mod_base = OTHER; note = 2'-O-methoxyethyl-thymidine
  modified_base 17: mod_base = OTHER; note = 2'-O-methoxyethyl-thymidine
  modified_base 18: mod_base = OTHER; note = 2'-O-methoxyethyl-5'-methylcytidine
gaataaaatctaaaattc

SEQ ID NO: 408 - RNA, 18 nt, synthetic construct
  source 1..18: mol_type = other RNA
  modified_base 1: mod_base = OTHER; note = 2'-O-methoxyethyl-guanosine
  modified_base 2: mod_base = OTHER; note = 2'-O-methoxyethyl-adenosine
  modified_base 3: mod_base = OTHER; note = 2'-O-methoxyethyl-thymidine
  modified_base 4: mod_base = OTHER; note = 2'-O-methoxyethyl-guanosine
  modified_base 5: mod_base = OTHER; note = 2'-O-methoxyethyl-guanosine
  modified_base 6: mod_base = OTHER; note = 2'-O-methoxyethyl-guanosine
  modified_base 7: mod_base = OTHER; note = 2'-O-methoxyethyl-adenosine
  modified_base 8: mod_base = OTHER; note = 2'-O-methoxyethyl-adenosine
  modified_base 9: mod_base = OTHER; note = 2'-O-methoxyethyl-thymidine
  modified_base 10: mod_base = OTHER; note = 2'-O-methoxyethyl-adenosine
  modified_base 11: mod_base = OTHER; note = 2'-O-methoxyethyl-adenosine
  modified_base 12: mod_base = OTHER; note = 2'-O-methoxyethyl-adenosine
  modified_base 13: mod_base = OTHER; note = 2'-O-methoxyethyl-adenosine
  modified_base 14: mod_base = OTHER; note = 2'-O-methoxyethyl-thymidine
  modified_base 15: mod_base = OTHER; note = 2'-O-methoxyethyl-5'-methylcytidine
  modified_base 16: mod_base = OTHER; note = 2'-O-methoxyethyl-thymidine
  modified_base 17: mod_base = OTHER; note = 2'-O-methoxyethyl-adenosine
  modified_base 18: mod_base = OTHER; note = 2'-O-methoxyethyl-adenosine
gatgggaataaaatctaa

SEQ ID NO: 409 - RNA, 18 nt, synthetic construct
  source 1..18: mol_type = other RNA
  modified_base 1: mod_base = OTHER; note = 2'-O-methoxyethyl-guanosine
  modified_base 2: mod_base = OTHER; note = 2'-O-methoxyethyl-5'-methylcytidine
  modified_base 3: mod_base = OTHER; note = 2'-O-methoxyethyl-thymidine
  modified_base 4: mod_base = OTHER; note = 2'-O-methoxyethyl-guanosine
  modified_base 5: mod_base = OTHER; note = 2'-O-methoxyethyl-thymidine
  modified_base 6: mod_base = OTHER; note = 2'-O-methoxyethyl-guanosine
  modified_base 7: mod_base = OTHER; note = 2'-O-methoxyethyl-adenosine
  modified_base 8: mod_base = OTHER; note = 2'-O-methoxyethyl-thymidine
  modified_base 9: mod_base = OTHER; note = 2'-O-methoxyethyl-guanosine
  modified_base 10: mod_base = OTHER; note = 2'-O-methoxyethyl-guanosine
  modified_base 11: mod_base = OTHER; note = 2'-O-methoxyethyl-guanosine
  modified_base 12: mod_base = OTHER; note = 2'-O-methoxyethyl-adenosine
  modified_base 13: mod_base = OTHER; note = 2'-O-methoxyethyl-adenosine
  modified_base 14: mod_base = OTHER; note = 2'-O-methoxyethyl-thymidine
  modified_base 15: mod_base = OTHER; note = 2'-O-methoxyethyl-adenosine
  modified_base 16: mod_base = OTHER; note = 2'-O-methoxyethyl-adenosine
  modified_base 17: mod_base = OTHER; note = 2'-O-methoxyethyl-adenosine
  modified_base 18: mod_base = OTHER; note = 2'-O-methoxyethyl-adenosine
gctgtgatgggaataaaa

SEQ ID NO: 410 - RNA, 18 nt, synthetic construct
  source 1..18: mol_type = other RNA
  modified_base 1: mod_base = OTHER; note = 2'-O-methoxyethyl-thymidine
  modified_base 2: mod_base = OTHER; note = 2'-O-methoxyethyl-adenosine
  modified_base 3: mod_base = OTHER; note = 2'-O-methoxyethyl-guanosine
  modified_base 4: mod_base = OTHER; note = 2'-O-methoxyethyl-adenosine
  modified_base 5: mod_base = OTHER; note = 2'-O-methoxyethyl-guanosine
  modified_base 6: mod_base = OTHER; note = 2'-O-methoxyethyl-guanosine
  modified_base 7: mod_base = OTHER; note = 2'-O-methoxyethyl-5'-methylcytidine
  modified_base 8: mod_base = OTHER; note = 2'-O-methoxyethyl-thymidine
  modified_base 9: mod_base = OTHER; note = 2'-O-methoxyethyl-guanosine
  modified_base 10: mod_base = OTHER; note = 2'-O-methoxyethyl-thymidine
  modified_base 11: mod_base = OTHER; note = 2'-O-methoxyethyl-guanosine
  modified_base 12: mod_base = OTHER; note = 2'-O-methoxyethyl-adenosine
  modified_base 13: mod_base = OTHER; note = 2'-O-methoxyethyl-thymidine
  modified_base 14: mod_base = OTHER; note = 2'-O-methoxyethyl-guanosine
  modified_base 15: mod_base = OTHER; note = 2'-O-methoxyethyl-guanosine
  modified_base 16: mod_base = OTHER; note = 2'-O-methoxyethyl-guanosine
  modified_base 17: mod_base = OTHER; note = 2'-O-methoxyethyl-adenosine
  modified_base 18: mod_base = OTHER; note = 2'-O-methoxyethyl-adenosine
tagaggctgtgatgggaa

SEQ ID NO: 411 - RNA, 18 nt, synthetic construct
  source 1..18: mol_type = other RNA
  modified_base 1: mod_base = OTHER; note = 2'-O-methoxyethyl-adenosine
  modified_base 2: mod_base = OTHER; note = 2'-O-methoxyethyl-adenosine
  modified_base 3: mod_base = OTHER; note = 2'-O-methoxyethyl-adenosine
  modified_base 4: mod_base = OTHER; note = 2'-O-methoxyethyl-guanosine
  modified_base 5: mod_base = OTHER; note = 2'-O-methoxyethyl-adenosine
  modified_base 6: mod_base = OTHER; note = 2'-O-methoxyethyl-thymidine
  modified_base 7: mod_base = OTHER; note = 2'-O-methoxyethyl-adenosine
  modified_base 8: mod_base = OTHER; note = 2'-O-methoxyethyl-guanosine
  modified_base 9: mod_base = OTHER; note = 2'-O-methoxyethyl-adenosine
  modified_base 10: mod_base = OTHER; note = 2'-O-methoxyethyl-guanosine
  modified_base 11: mod_base = OTHER; note = 2'-O-methoxyethyl-guanosine
  modified_base 12: mod_base = OTHER; note = 2'-O-methoxyethyl-5'-methylcytidine
  modified_base 13: mod_base = OTHER; note = 2'-O-methoxyethyl-thymidine
  modified_base 14: mod_base = OTHER; note = 2'-O-methoxyethyl-guanosine
  modified_base 15: mod_base = OTHER; note = 2'-O-methoxyethyl-thymidine
  modified_base 16: mod_base = OTHER; note = 2'-O-methoxyethyl-guanosine
  modified_base 17: mod_base = OTHER; note = 2'-O-methoxyethyl-adenosine
  modified_base 18: mod_base = OTHER; note = 2'-O-methoxyethyl-thymidine
aaagatagaggctgtgat

SEQ ID NO: 412 - RNA, 18 nt, synthetic construct
  source 1..18: mol_type = other RNA
  modified_base 1: mod_base = OTHER; note = 2'-O-methoxyethyl-adenosine
  modified_base 2: mod_base = OTHER; note = 2'-O-methoxyethyl-adenosine
  modified_base 3: mod_base = OTHER; note = 2'-O-methoxyethyl-adenosine
  modified_base 4: mod_base = OTHER; note = 2'-O-methoxyethyl-adenosine
  modified_base 5: mod_base = OTHER; note = 2'-O-methoxyethyl-guanosine
  modified_base 6: mod_base = OTHER; note = 2'-O-methoxyethyl-adenosine
  modified_base 7: mod_base = OTHER; note = 2'-O-methoxyethyl-adenosine
  modified_base 8: mod_base = OTHER; note = 2'-O-methoxyethyl-adenosine
  modified_base 9: mod_base = OTHER; note = 2'-O-methoxyethyl-guanosine
  modified_base 10: mod_base = OTHER; note = 2'-O-methoxyethyl-adenosine
  modified_base 11: mod_base = OTHER; note = 2'-O-methoxyethyl-thymidine
  modified_base 12: mod_base = OTHER; note = 2'-O-methoxyethyl-adenosine
  modified_base 13: mod_base = OTHER; note = 2'-O-methoxyethyl-guanosine
  modified_base 14: mod_base = OTHER; note = 2'-O-methoxyethyl-adenosine
  modified_base 15: mod_base = OTHER; note = 2'-O-methoxyethyl-guanosine
  modified_base 16: mod_base = OTHER; note = 2'-O-methoxyethyl-guanosine
  modified_base 17: mod_base = OTHER; note = 2'-O-methoxyethyl-5'-methylcytidine
  modified_base 18: mod_base = OTHER; note = 2'-O-methoxyethyl-thymidine
aaaagaaagatagaggct

SEQ ID NO: 413 - RNA, 18 nt, synthetic construct
  source 1..18: mol_type = other RNA
  modified_base 1: mod_base = OTHER; note = 2'-O-methoxyethyl-guanosine
  modified_base 2: mod_base = OTHER; note = 2'-O-methoxyethyl-adenosine
  modified_base 3: mod_base = OTHER; note = 2'-O-methoxyethyl-5'-methylcytidine
  modified_base 4: mod_base = OTHER; note = 2'-O-methoxyethyl-5'-methylcytidine
  modified_base 5: mod_base = OTHER; note = 2'-O-methoxyethyl-thymidine
  modified_base 6: mod_base = OTHER; note = 2'-O-methoxyethyl-adenosine
  modified_base 7: mod_base = OTHER; note = 2'-O-methoxyethyl-adenosine
  modified_base 8: mod_base = OTHER; note = 2'-O-methoxyethyl-adenosine
  modified_base 9: mod_base = OTHER; note = 2'-O-methoxyethyl-adenosine
  modified_base 10: mod_base = OTHER; note = 2'-O-methoxyethyl-guanosine
  modified_base 11: mod_base = OTHER; note = 2'-O-methoxyethyl-adenosine
  modified_base 12: mod_base = OTHER; note = 2'-O-methoxyethyl-adenosine
  modified_base 13: mod_base = OTHER; note = 2'-O-methoxyethyl-adenosine
  modified_base 14: mod_base = OTHER; note = 2'-O-methoxyethyl-guanosine
  modified_base 15: mod_base = OTHER; note = 2'-O-methoxyethyl-adenosine
  modified_base 16: mod_base = OTHER; note = 2'-O-methoxyethyl-thymidine
  modified_base 17: mod_base = OTHER; note = 2'-O-methoxyethyl-adenosine
  modified_base 18: mod_base = OTHER; note = 2'-O-methoxyethyl-guanosine
gacctaaaagaaagatag

SEQ ID NO: 414 - RNA, 18 nt, synthetic construct
  source 1..18: mol_type = other RNA
  modified_base 1: mod_base = OTHER; note = 2'-O-methoxyethyl-adenosine
  modified_base 2: mod_base = OTHER; note = 2'-O-methoxyethyl-thymidine
  modified_base 3: mod_base = OTHER; note = 2'-O-methoxyethyl-adenosine
  modified_base 4: mod_base = OTHER; note = 2'-O-methoxyethyl-adenosine
  modified_base 5: mod_base = OTHER; note = 2'-O-methoxyethyl-adenosine
  modified_base 6: mod_base = OTHER; note = 2'-O-methoxyethyl-guanosine
  modified_base 7: mod_base = OTHER; note = 2'-O-methoxyethyl-adenosine
  modified_base 8: mod_base = OTHER; note = 2'-O-methoxyethyl-5'-methylcytidine
  modified_base 9: mod_base = OTHER; note = 2'-O-methoxyethyl-5'-methylcytidine
  modified_base 10: mod_base = OTHER; note = 2'-O-methoxyethyl-thymidine
  modified_base 11: mod_base = OTHER; note = 2'-O-methoxyethyl-adenosine
  modified_base 12: mod_base = OTHER; note = 2'-O-methoxyethyl-adenosine
  modified_base 13: mod_base = OTHER; note = 2'-O-methoxyethyl-adenosine
  modified_base 14: mod_base = OTHER; note = 2'-O-methoxyethyl-adenosine
  modified_base 15: mod_base = OTHER; note = 2'-O-methoxyethyl-guanosine
  modified_base 16: mod_base = OTHER; note = 2'-O-methoxyethyl-adenosine
  modified_base 17: mod_base = OTHER; note = 2'-O-methoxyethyl-adenosine
  modified_base 18: mod_base = OTHER; note = 2'-O-methoxyethyl-adenosine
ataaagacctaaaagaaa

SEQ ID NO: 415 - RNA, 18 nt, synthetic construct
  source 1..18: mol_type = other RNA
  modified_base 1: mod_base = OTHER; note = 2'-O-methoxyethyl-guanosine
  modified_base 2: mod_base = OTHER; note = 2'-O-methoxyethyl-adenosine
  modified_base 3: mod_base = OTHER; note = 2'-O-methoxyethyl-guanosine
  modified_base 4: mod_base = OTHER; note = 2'-O-methoxyethyl-adenosine
  modified_base 5: mod_base = OTHER; note = 2'-O-methoxyethyl-thymidine
  modified_base 6: mod_base = OTHER; note = 2'-O-methoxyethyl-adenosine
  modified_base 7: mod_base = OTHER; note = 2'-O-methoxyethyl-thymidine
  modified_base 8: mod_base = OTHER; note = 2'-O-methoxyethyl-adenosine
  modified_base 9: mod_base = OTHER; note = 2'-O-methoxyethyl-adenosine
  modified_base 10: mod_base = OTHER; note = 2'-O-methoxyethyl-adenosine
  modified_base 11: mod_base = OTHER; note = 2'-O-methoxyethyl-guanosine
  modified_base 12: mod_base = OTHER; note = 2'-O-methoxyethyl-adenosine
  modified_base 13: mod_base = OTHER; note = 2'-O-methoxyethyl-5'-methylcytidine
  modified_base 14: mod_base = OTHER; note = 2'-O-methoxyethyl-5'-methylcytidine
  modified_base 15: mod_base = OTHER; note = 2'-O-methoxyethyl-thymidine
  modified_base 16: mod_base = OTHER; note = 2'-O-methoxyethyl-adenosine
  modified_base 17: mod_base = OTHER; note = 2'-O-methoxyethyl-adenosine
  modified_base 18: mod_base = OTHER; note = 2'-O-methoxyethyl-adenosine
gagatataaagacctaaa

SEQ ID NO: 416 - RNA, 18 nt, synthetic construct
  source 1..18: mol_type = other RNA
  modified_base 1: mod_base = OTHER; note = 2'-O-methoxyethyl-guanosine
  modified_base 2: mod_base = OTHER; note = 2'-O-methoxyethyl-guanosine
  modified_base 3: mod_base = OTHER; note = 2'-O-methoxyethyl-5'-methylcytidine
  modified_base 4: mod_base = OTHER; note = 2'-O-methoxyethyl-thymidine
  modified_base 5: mod_base = OTHER; note = 2'-O-methoxyethyl-guanosine
  modified_base 6: mod_base = OTHER; note = 2'-O-methoxyethyl-thymidine
  modified_base 7: mod_base = OTHER; note = 2'-O-methoxyethyl-guanosine
  modified_base 8: mod_base = OTHER; note = 2'-O-methoxyethyl-adenosine
  modified_base 9: mod_base = OTHER; note = 2'-O-methoxyethyl-thymidine
  modified_base 10: mod_base = OTHER; note = 2'-O-methoxyethyl-guanosine
  modified_base 11: mod_base = OTHER; note = 2'-O-methoxyethyl-guanosine
  modified_base 12: mod_base = OTHER; note = 2'-O-methoxyethyl-guanosine
  modified_base 13: mod_base = OTHER; note = 2'-O-methoxyethyl-adenosine
  modified_base 14: mod_base = OTHER; note = 2'-O-methoxyethyl-adenosine
  modified_base 15: mod_base = OTHER; note = 2'-O-methoxyethyl-thymidine
  modified_base 16: mod_base = OTHER; note = 2'-O-methoxyethyl-adenosine
  modified_base 17: mod_base = OTHER; note = 2'-O-methoxyethyl-adenosine
  modified_base 18: mod_base = OTHER; note = 2'-O-methoxyethyl-adenosine
ggctgtgatgggaataaa

SEQ ID NO: 417 - RNA, 18 nt, synthetic construct
  source 1..18: mol_type = other RNA
  modified_base 1: mod_base = OTHER; note = 2'-O-methoxyethyl-adenosine
  modified_base 2: mod_base = OTHER; note = 2'-O-methoxyethyl-guanosine
  modified_base 3: mod_base = OTHER; note = 2'-O-methoxyethyl-guanosine
  modified_base 4: mod_base = OTHER; note = 2'-O-methoxyethyl-5'-methylcytidine
  modified_base 5: mod_base = OTHER; note = 2'-O-methoxyethyl-thymidine
  modified_base 6: mod_base = OTHER; note = 2'-O-methoxyethyl-guanosine
  modified_base 7: mod_base = OTHER; note = 2'-O-methoxyethyl-thymidine
  modified_base 8: mod_base = OTHER; note = 2'-O-methoxyethyl-guanosine
  modified_base 9: mod_base = OTHER; note = 2'-O-methoxyethyl-adenosine
  modified_base 10: mod_base = OTHER; note = 2'-O-methoxyethyl-thymidine
  modified_base 11: mod_base = OTHER; note = 2'-O-methoxyethyl-guanosine
  modified_base 12: mod_base = OTHER; note = 2'-O-methoxyethyl-guanosine
  modified_base 13: mod_base = OTHER; note = 2'-O-methoxyethyl-guanosine
  modified_base 14: mod_base = OTHER; note = 2'-O-methoxyethyl-adenosine
  modified_base 15: mod_base = OTHER; note = 2'-O-methoxyethyl-adenosine
  modified_base 16: mod_base = OTHER; note = 2'-O-methoxyethyl-thymidine
  modified_base 17: mod_base = OTHER; note = 2'-O-methoxyethyl-adenosine
  modified_base 18: mod_base = OTHER; note = 2'-O-methoxyethyl-adenosine
aggctgtgatgggaataa

SEQ ID NO: 418 - RNA, 18 nt, synthetic construct
  source 1..18: mol_type = other RNA
  modified_base 1: mod_base = OTHER; note = 2'-O-methoxyethyl-guanosine
  modified_base 2: mod_base = OTHER; note = 2'-O-methoxyethyl-adenosine
  modified_base 3: mod_base = OTHER; note = 2'-O-methoxyethyl-guanosine
  modified_base 4: mod_base = OTHER; note = 2'-O-methoxyethyl-guanosine
  modified_base 5: mod_base = OTHER; note = 2'-O-methoxyethyl-5'-methylcytidine
  modified_base 6: mod_base = OTHER; note = 2'-O-methoxyethyl-thymidine
  modified_base 7: mod_base = OTHER; note = 2'-O-methoxyethyl-guanosine
  modified_base 8: mod_base = OTHER; note = 2'-O-methoxyethyl-thymidine
  modified_base 9: mod_base = OTHER; note = 2'-O-methoxyethyl-guanosine
  modified_base 10: mod_base = OTHER; note = 2'-O-methoxyethyl-adenosine
  modified_base 11: mod_base = OTHER; note = 2'-O-methoxyethyl-thymidine
  modified_base 12: mod_base = OTHER; note = 2'-O-methoxyethyl-guanosine
  modified_base 13: mod_base = OTHER; note = 2'-O-methoxyethyl-guanosine
  modified_base 14: mod_base = OTHER; note = 2'-O-methoxyethyl-guanosine
  modified_base 15: mod_base = OTHER; note = 2'-O-methoxyethyl-adenosine
  modified_base 16: mod_base = OTHER; note = 2'-O-methoxyethyl-adenosine
  modified_base 17: mod_base = OTHER; note = 2'-O-methoxyethyl-thymidine
  modified_base 18: mod_base = OTHER; note = 2'-O-methoxyethyl-adenosine
gaggctgtgatgggaata

SEQ ID NO: 419 - RNA, 18 nt, synthetic construct
  source 1..18: mol_type = other RNA
  modified_base 1: mod_base = OTHER; note = 2'-O-methoxyethyl-adenosine
  modified_base 2: mod_base = OTHER; note = 2'-O-methoxyethyl-guanosine
  modified_base 3: mod_base = OTHER; note = 2'-O-methoxyethyl-adenosine
  modified_base 4: mod_base = OTHER; note = 2'-O-methoxyethyl-guanosine
  modified_base 5: mod_base = OTHER; note = 2'-O-methoxyethyl-guanosine
  modified_base 6: mod_base = OTHER; note = 2'-O-methoxyethyl-5'-methylcytidine
  modified_base 7: mod_base = OTHER; note = 2'-O-methoxyethyl-thymidine
  modified_base 8: mod_base = OTHER; note = 2'-O-methoxyethyl-guanosine
  modified_base 9: mod_base = OTHER; note = 2'-O-methoxyethyl-thymidine
  modified_base 10: mod_base = OTHER; note = 2'-O-methoxyethyl-guanosine
  modified_base 11: mod_base = OTHER; note = 2'-O-methoxyethyl-adenosine
  modified_base 12: mod_base = OTHER; note = 2'-O-methoxyethyl-thymidine
  modified_base 13: mod_base = OTHER; note = 2'-O-methoxyethyl-guanosine
  modified_base 14: mod_base = OTHER; note = 2'-O-methoxyethyl-guanosine
  modified_base 15: mod_base = OTHER; note = 2'-O-methoxyethyl-guanosine
  modified_base 16: mod_base = OTHER; note = 2'-O-methoxyethyl-adenosine
  modified_base 17: mod_base = OTHER; note = 2'-O-methoxyethyl-adenosine
  modified_base 18: mod_base = OTHER; note = 2'-O-methoxyethyl-thymidine
agaggctgtgatgggaat

SEQ ID NO: 420 - RNA, 18 nt, synthetic construct
  source 1..18: mol_type = other RNA
  modified_base 1: mod_base = OTHER; note = 2'-O-methoxyethyl-adenosine
  modified_base 2: mod_base = OTHER; note = 2'-O-methoxyethyl-thymidine
  modified_base 3: mod_base = OTHER; note = 2'-O-methoxyethyl-adenosine
  modified_base 4: mod_base = OTHER; note = 2'-O-methoxyethyl-guanosine
  modified_base 5: mod_base = OTHER; note = 2'-O-methoxyethyl-adenosine
  modified_base 6: mod_base = OTHER; note = 2'-O-methoxyethyl-guanosine
  modified_base 7: mod_base = OTHER; note = 2'-O-methoxyethyl-guanosine
  modified_base 8: mod_base = OTHER; note = 2'-O-methoxyethyl-5'-methylcytidine
  modified_base 9: mod_base = OTHER; note = 2'-O-methoxyethyl-thymidine
  modified_base 10: mod_base = OTHER; note = 2'-O-methoxyethyl-guanosine
  modified_base 11: mod_base = OTHER; note = 2'-O-methoxyethyl-thymidine
  modified_base 12: mod_base = OTHER; note = 2'-O-methoxyethyl-guanosine
  modified_base 13: mod_base = OTHER; note = 2'-O-methoxyethyl-adenosine
  modified_base 14: mod_base = OTHER; note = 2'-O-methoxyethyl-thymidine
  modified_base 15: mod_base = OTHER; note = 2'-O-methoxyethyl-guanosine
  modified_base 16: mod_base = OTHER; note = 2'-O-methoxyethyl-guanosine
  modified_base 17: mod_base = OTHER; note = 2'-O-methoxyethyl-guanosine
  modified_base 18: mod_base = OTHER; note = 2'-O-methoxyethyl-adenosine
atagaggctgtgatggga

SEQ ID NO: 421 - RNA, 18 nt, synthetic construct
  source 1..18: mol_type = other RNA
  modified_base 1: mod_base = OTHER; note = 2'-O-methoxyethyl-guanosine
  modified_base 2: mod_base = OTHER; note = 2'-O-methoxyethyl-adenosine
  modified_base 3: mod_base = OTHER; note = 2'-O-methoxyethyl-thymidine
  modified_base 4: mod_base = OTHER; note = 2'-O-methoxyethyl-adenosine
  modified_base 5: mod_base = OTHER; note = 2'-O-methoxyethyl-guanosine
  modified_base 6: mod_base = OTHER; note = 2'-O-methoxyethyl-adenosine
  modified_base 7: mod_base = OTHER; note = 2'-O-methoxyethyl-guanosine
  modified_base 8: mod_base = OTHER; note = 2'-O-methoxyethyl-guanosine
  modified_base 9: mod_base = OTHER; note = 2'-O-methoxyethyl-5'-methylcytidine
  modified_base 10: mod_base = OTHER; note = 2'-O-methoxyethyl-thymidine
  modified_base 11: mod_base = OTHER; note = 2'-O-methoxyethyl-guanosine
  modified_base 12: mod_base = OTHER; note = 2'-O-methoxyethyl-thymidine
  modified_base 13: mod_base = OTHER; note = 2'-O-methoxyethyl-guanosine
  modified_base 14: mod_base = OTHER; note = 2'-O-methoxyethyl-adenosine
  modified_base 15: mod_base = OTHER; note = 2'-O-methoxyethyl-thymidine
  modified_base 16: mod_base = OTHER; note = 2'-O-methoxyethyl-guanosine
  modified_base 17: mod_base = OTHER; note = 2'-O-methoxyethyl-guanosine
  modified_base 18: mod_base = OTHER; note = 2'-O-methoxyethyl-guanosine
gatagaggctgtgatggg

SEQ ID NO: 422 - RNA, 18 nt, synthetic construct
  source 1..18: mol_type = other RNA
  modified_base 1: mod_base = OTHER; note = 2'-O-methoxyethyl-adenosine
  modified_base 2: mod_base = OTHER; note = 2'-O-methoxyethyl-guanosine
  modified_base 3: mod_base = OTHER; note = 2'-O-methoxyethyl-adenosine
  modified_base 4: mod_base = OTHER; note = 2'-O-methoxyethyl-thymidine
  modified_base 5: mod_base = OTHER; note = 2'-O-methoxyethyl-adenosine
  modified_base 6: mod_base = OTHER; note = 2'-O-methoxyethyl-guanosine
  modified_base 7: mod_base = OTHER; note = 2'-O-methoxyethyl-adenosine
  modified_base 8: mod_base = OTHER; note = 2'-O-methoxyethyl-guanosine
  modified_base 9: mod_base = OTHER; note = 2'-O-methoxyethyl-guanosine
  modified_base 10: mod_base = OTHER; note = 2'-O-methoxyethyl-5'-methylcytidine
  modified_base 11: mod_base = OTHER; note = 2'-O-methoxyethyl-thymidine
  modified_base 12: mod_base = OTHER; note = 2'-O-methoxyethyl-guanosine
  modified_base 13: mod_base = OTHER; note = 2'-O-methoxyethyl-thymidine
  modified_base 14: mod_base = OTHER; note = 2'-O-methoxyethyl-guanosine
  modified_base 15: mod_base = OTHER; note = 2'-O-methoxyethyl-adenosine
  modified_base 16: mod_base = OTHER; note = 2'-O-methoxyethyl-thymidine
  modified_base 17: mod_base = OTHER; note = 2'-O-methoxyethyl-guanosine
  modified_base 18: mod_base = OTHER; note = 2'-O-methoxyethyl-guanosine
agatagaggctgtgatgg

SEQ ID NO: 423 - RNA, 18 nt, synthetic construct
  source 1..18: mol_type = other RNA
  modified_base 1: mod_base = OTHER; note = 2'-O-methoxyethyl-adenosine
  modified_base 2: mod_base = OTHER; note = 2'-O-methoxyethyl-adenosine
  modified_base 3: mod_base = OTHER; note = 2'-O-methoxyethyl-guanosine
  modified_base 4: mod_base = OTHER; note = 2'-O-methoxyethyl-adenosine
  modified_base 5: mod_base = OTHER; note = 2'-O-methoxyethyl-thymidine
  modified_base 6: mod_base = OTHER; note = 2'-O-methoxyethyl-adenosine
  modified_base 7: mod_base = OTHER; note = 2'-O-methoxyethyl-guanosine
  modified_base 8: mod_base = OTHER; note = 2'-O-methoxyethyl-adenosine
  modified_base 9: mod_base = OTHER; note = 2'-O-methoxyethyl-guanosine
  modified_base 10: mod_base = OTHER; note = 2'-O-methoxyethyl-guanosine
  modified_base 11: mod_base = OTHER; note = 2'-O-methoxyethyl-5'-methylcytidine
  modified_base 12: mod_base = OTHER; note = 2'-O-methoxyethyl-thymidine
  modified_base 13: mod_base = OTHER; note = 2'-O-methoxyethyl-guanosine
  modified_base 14: mod_base = OTHER; note = 2'-O-methoxyethyl-thymidine
  modified_base 15: mod_base = OTHER; note = 2'-O-methoxyethyl-guanosine
  modified_base 16: mod_base = OTHER; note = 2'-O-methoxyethyl-adenosine
  modified_base 17: mod_base = OTHER; note = 2'-O-methoxyethyl-thymidine
  modified_base 18: mod_base = OTHER; note = 2'-O-methoxyethyl-guanosine
aagatagaggctgtgatg

SEQ ID NO: 424 - RNA, 22 nt, synthetic construct
  source 1..22: mol_type = other RNA
  modified_base 1: mod_base = OTHER; note = 2'-O-methoxyethyl-thymidine
  modified_base 2: mod_base = OTHER; note = 2'-O-methoxyethyl-adenosine
  modified_base 3: mod_base = OTHER; note = 2'-O-methoxyethyl-guanosine
  modified_base 4: mod_base = OTHER; note = 2'-O-methoxyethyl-adenosine
  modified_base 5: mod_base = OTHER; note = 2'-O-methoxyethyl-guanosine
  modified_base 6: mod_base = OTHER; note = 2'-O-methoxyethyl-guanosine
  modified_base 7: mod_base = OTHER; note = 2'-O-methoxyethyl-5'-methylcytidine
  modified_base 8: mod_base = OTHER; note = 2'-O-methoxyethyl-thymidine
  modified_base 9: mod_base = OTHER; note = 2'-O-methoxyethyl-guanosine
  modified_base 10: mod_base = OTHER; note = 2'-O-methoxyethyl-thymidine
  modified_base 11: mod_base = OTHER; note = 2'-O-methoxyethyl-guanosine
  modified_base 12: mod_base = OTHER; note = 2'-O-methoxyethyl-adenosine
  modified_base 13: mod_base = OTHER; note = 2'-O-methoxyethyl-thymidine
  modified_base 14: mod_base = OTHER; note = 2'-O-methoxyethyl-guanosine
  modified_base 15: mod_base = OTHER; note = 2'-O-methoxyethyl-guanosine
  modified_base 16: mod_base = OTHER; note = 2'-O-methoxyethyl-guanosine
  modified_base 17: mod_base = OTHER; note = 2'-O-methoxyethyl-adenosine
  modified_base 18: mod_base = OTHER; note = 2'-O-methoxyethyl-adenosine
  modified_base 19: mod_base = OTHER; note = 2'-O-methoxyethyl-thymidine
  modified_base 20: mod_base = OTHER; note = 2'-O-methoxyethyl-adenosine
  modified_base 21: mod_base = OTHER; note = 2'-O-methoxyethyl-adenosine
  modified_base 22: mod_base = OTHER; note = 2'-O-methoxyethyl-adenosine
tagaggctgtgatgggaataaa

SEQ ID NO: 425 - RNA, 22 nt, synthetic construct
  source 1..22: mol_type = other RNA
  modified_base 1: mod_base = OTHER; note = 2'-O-methoxyethyl-adenosine
  modified_base 2: mod_base = OTHER; note = 2'-O-methoxyethyl-thymidine
  modified_base 3: mod_base = OTHER; note = 2'-O-methoxyethyl-adenosine
  modified_base 4: mod_base = OTHER; note = 2'-O-methoxyethyl-guanosine
  modified_base 5: mod_base = OTHER; note = 2'-O-methoxyethyl-adenosine
  modified_base 6: mod_base = OTHER; note = 2'-O-methoxyethyl-guanosine
  modified_base 7: mod_base = OTHER; note = 2'-O-methoxyethyl-guanosine
  modified_base 8: mod_base = OTHER; note = 2'-O-methoxyethyl-5'-methylcytidine
  modified_base 9: mod_base = OTHER; note = 2'-O-methoxyethyl-thymidine
  modified_base 10: mod_base = OTHER; note = 2'-O-methoxyethyl-guanosine
  modified_base 11: mod_base = OTHER; note = 2'-O-methoxyethyl-thymidine
  modified_base 12: mod_base = OTHER; note = 2'-O-methoxyethyl-guanosine
  modified_base 13: mod_base = OTHER; note = 2'-O-methoxyethyl-adenosine
  modified_base 14: mod_base = OTHER; note = 2'-O-methoxyethyl-thymidine
  modified_base 15: mod_base = OTHER; note = 2'-O-methoxyethyl-guanosine
  modified_base 16: mod_base = OTHER; note = 2'-O-methoxyethyl-guanosine
  modified_base 17: mod_base = OTHER; note = 2'-O-methoxyethyl-guanosine
  modified_base 18: mod_base = OTHER; note = 2'-O-methoxyethyl-adenosine
  modified_base 19: mod_base = OTHER; note = 2'-O-methoxyethyl-adenosine
  modified_base 20: mod_base = OTHER; note = 2'-O-methoxyethyl-thymidine
  modified_base 21: mod_base = OTHER; note = 2'-O-methoxyethyl-adenosine
  modified_base 22: mod_base = OTHER; note = 2'-O-methoxyethyl-adenosine
atagaggctgtgatgggaataa

SEQ ID NO: 426 - RNA, 22 nt, synthetic construct
  source 1..22: mol_type = other RNA
  modified_base 1: mod_base = OTHER; note = 2'-O-methoxyethyl-guanosine
  modified_base 2: mod_base = OTHER; note = 2'-O-methoxyethyl-adenosine
  modified_base 3: mod_base = OTHER; note = 2'-O-methoxyethyl-thymidine
  modified_base 4: mod_base = OTHER; note = 2'-O-methoxyethyl-adenosine
  modified_base 5: mod_base = OTHER; note = 2'-O-methoxyethyl-guanosine
  modified_base 6: mod_base = OTHER; note = 2'-O-methoxyethyl-adenosine
  modified_base 7: mod_base = OTHER; note = 2'-O-methoxyethyl-guanosine
  modified_base 8: mod_base = OTHER; note = 2'-O-methoxyethyl-guanosine
  modified_base 9: mod_base = OTHER; note = 2'-O-methoxyethyl-5'-methylcytidine
  modified_base 10: mod_base = OTHER; note = 2'-O-methoxyethyl-thymidine
  modified_base 11: mod_base = OTHER; note = 2'-O-methoxyethyl-guanosine
  modified_base 12: mod_base = OTHER; note = 2'-O-methoxyethyl-thymidine
  modified_base 13: mod_base = OTHER; note = 2'-O-methoxyethyl-guanosine
  modified_base 14: mod_base = OTHER; note = 2'-O-methoxyethyl-adenosine
  modified_base 15: mod_base = OTHER; note = 2'-O-methoxyethyl-thymidine
  modified_base 16: mod_base = OTHER; note = 2'-O-methoxyethyl-guanosine
  modified_base 17: mod_base = OTHER; note = 2'-O-methoxyethyl-guanosine
  modified_base 18: mod_base = OTHER; note = 2'-O-methoxyethyl-guanosine
  modified_base 19: mod_base = OTHER; note = 2'-O-methoxyethyl-adenosine
  modified_base 20: mod_base = OTHER; note = 2'-O-methoxyethyl-adenosine
  modified_base 21: mod_base = OTHER; note = 2'-O-methoxyethyl-thymidine
  modified_base 22: mod_base = OTHER; note = 2'-O-methoxyethyl-adenosine
gatagaggctgtgatgggaata

SEQ ID NO: 427 - RNA, 22 nt, synthetic construct
  source 1..22: mol_type = other RNA
  modified_base 1: mod_base = OTHER; note = 2'-O-methoxyethyl-adenosine
  modified_base 2: mod_base = OTHER; note = 2'-O-methoxyethyl-guanosine
  modified_base 3: mod_base = OTHER; note = 2'-O-methoxyethyl-adenosine
  modified_base 4: mod_base = OTHER; note = 2'-O-methoxyethyl-thymidine
  modified_base 5: mod_base = OTHER; note = 2'-O-methoxyethyl-adenosine
  modified_base 6: mod_base = OTHER; note = 2'-O-methoxyethyl-guanosine
  modified_base 7: mod_base = OTHER; note = 2'-O-methoxyethyl-adenosine
  modified_base 8: mod_base = OTHER; note = 2'-O-methoxyethyl-guanosine
  modified_base 9: mod_base = OTHER; note = 2'-O-methoxyethyl-guanosine
  modified_base 10: mod_base = OTHER; note = 2'-O-methoxyethyl-5'-methylcytidine
  modified_base 11: mod_base = OTHER; note = 2'-O-methoxyethyl-thymidine
  modified_base 12: mod_base = OTHER; note = 2'-O-methoxyethyl-guanosine
  modified_base 13: mod_base = OTHER; note = 2'-O-methoxyethyl-thymidine
  modified_base 14: mod_base = OTHER; note = 2'-O-methoxyethyl-guanosine
  modified_base 15: mod_base = OTHER; note = 2'-O-methoxyethyl-adenosine
  modified_base 16: mod_base = OTHER; note = 2'-O-methoxyethyl-thymidine
  modified_base 17: mod_base = OTHER; note = 2'-O-methoxyethyl-guanosine
  modified_base 18: mod_base = OTHER; note = 2'-O-methoxyethyl-guanosine
  modified_base 19: mod_base = OTHER; note = 2'-O-methoxyethyl-guanosine
  modified_base 20: mod_base = OTHER; note = 2'-O-methoxyethyl-adenosine
  modified_base 21: mod_base = OTHER; note = 2'-O-methoxyethyl-adenosine
  modified_base 22: mod_base = OTHER; note = 2'-O-methoxyethyl-thymidine
agatagaggctgtgatgggaat

SEQ ID NO: 428 - RNA, 22 nt, synthetic construct
  source 1..22: mol_type = other RNA
  modified_base 1: mod_base = OTHER; note = 2'-O-methoxyethyl-adenosine
  modified_base 2: mod_base = OTHER; note = 2'-O-methoxyethyl-adenosine
  modified_base 3: mod_base = OTHER; note = 2'-O-methoxyethyl-guanosine
  modified_base 4: mod_base = OTHER; note = 2'-O-methoxyethyl-adenosine
  modified_base 5: mod_base = OTHER; note = 2'-O-methoxyethyl-thymidine
  modified_base 6: mod_base = OTHER; note = 2'-O-methoxyethyl-adenosine
  modified_base 7: mod_base = OTHER; note = 2'-O-methoxyethyl-guanosine
  modified_base 8: mod_base = OTHER; note = 2'-O-methoxyethyl-adenosine
  modified_base 9: mod_base = OTHER; note = 2'-O-methoxyethyl-guanosine
  modified_base 10: mod_base = OTHER; note = 2'-O-methoxyethyl-guanosine
  modified_base 11: mod_base = OTHER; note = 2'-O-methoxyethyl-5'-methylcytidine
  modified_base 12: mod_base = OTHER; note = 2'-O-methoxyethyl-thymidine
  modified_base 13: mod_base = OTHER; note = 2'-O-methoxyethyl-guanosine
  modified_base 14: mod_base = OTHER; note = 2'-O-methoxyethyl-thymidine
  modified_base 15: mod_base = OTHER; note = 2'-O-methoxyethyl-guanosine
  modified_base 16: mod_base = OTHER; note = 2'-O-methoxyethyl-adenosine
  modified_base 17: mod_base = OTHER; note = 2'-O-methoxyethyl-thymidine
  modified_base 18: mod_base = OTHER; note = 2'-O-methoxyethyl-guanosine
  modified_base 19: mod_base = OTHER; note = 2'-O-methoxyethyl-guanosine
  modified_base 20: mod_base = OTHER; note = 2'-O-methoxyethyl-guanosine
  modified_base 21: mod_base = OTHER; note = 2'-O-methoxyethyl-adenosine
  modified_base 22: mod_base = OTHER; note = 2'-O-methoxyethyl-adenosine
aagatagaggctgtgatgggaa

SEQ ID NO: 429 - RNA, 20 nt, synthetic construct
  source 1..20: mol_type = other RNA
  modified_base 1: mod_base = OTHER; note = 2'-O-methoxyethyl-guanosine
  modified_base 2: mod_base = OTHER; note = 2'-O-methoxyethyl-adenosine
  modified_base 3: mod_base = OTHER; note = 2'-O-methoxyethyl-guanosine
  modified_base 4: mod_base = OTHER; note = 2'-O-methoxyethyl-guanosine
  modified_base 5: mod_base = OTHER; note = 2'-O-methoxyethyl-5'-methylcytidine
  modified_base 6: mod_base = OTHER; note = 2'-O-methoxyethyl-thymidine
  modified_base 7: mod_base = OTHER; note = 2'-O-methoxyethyl-guanosine
  modified_base 8: mod_base = OTHER; note = 2'-O-methoxyethyl-thymidine
  modified_base 9: mod_base = OTHER; note = 2'-O-methoxyethyl-guanosine
  modified_base 10: mod_base = OTHER; note = 2'-O-methoxyethyl-adenosine
  modified_base 11: mod_base = OTHER; note = 2'-O-methoxyethyl-thymidine
  modified_base 12: mod_base = OTHER; note = 2'-O-methoxyethyl-guanosine
  modified_base 13: mod_base = OTHER; note = 2'-O-methoxyethyl-guanosine
  modified_base 14: mod_base = OTHER; note = 2'-O-methoxyethyl-guanosine
  modified_base 15: mod_base = OTHER; note = 2'-O-methoxyethyl-adenosine
  modified_base 16: mod_base = OTHER; note = 2'-O-methoxyethyl-adenosine
  modified_base 17: mod_base = OTHER; note = 2'-O-methoxyethyl-thymidine
  modified_base 18: mod_base = OTHER; note = 2'-O-methoxyethyl-adenosine
  modified_base 19: mod_base = OTHER; note = 2'-O-methoxyethyl-adenosine
  modified_base 20: mod_base = OTHER; note = 2'-O-methoxyethyl-adenosine
gaggctgtgatgggaataaa

SEQ ID NO: 430 - RNA, 20 nt, synthetic construct
  source 1..20: mol_type = other RNA
  modified_base 1: mod_base = OTHER; note = 2'-O-methoxyethyl-adenosine
  modified_base 2: mod_base = OTHER; note = 2'-O-methoxyethyl-guanosine
  modified_base 3: mod_base = OTHER; note = 2'-O-methoxyethyl-adenosine
  modified_base 4: mod_base = OTHER; note = 2'-O-methoxyethyl-guanosine
  modified_base 5: mod_base = OTHER; note = 2'-O-methoxyethyl-guanosine
  modified_base 6: mod_base = OTHER; note = 2'-O-methoxyethyl-5'-methylcytidine
  modified_base 7: mod_base = OTHER; note = 2'-O-methoxyethyl-thymidine
  modified_base 8: mod_base = OTHER; note = 2'-O-methoxyethyl-guanosine
  modified_base 9: mod_base = OTHER; note = 2'-O-methoxyethyl-thymidine
  modified_base 10: mod_base = OTHER; note = 2'-O-methoxyethyl-guanosine
  modified_base 11: mod_base = OTHER; note = 2'-O-methoxyethyl-adenosine
  modified_base 12: mod_base = OTHER; note = 2'-O-methoxyethyl-thymidine
  modified_base 13: mod_base = OTHER; note = 2'-O-methoxyethyl-guanosine
  modified_base 14: mod_base = OTHER; note = 2'-O-methoxyethyl-guanosine
  modified_base 15: mod_base = OTHER; note = 2'-O-methoxyethyl-guanosine
  modified_base 16: mod_base = OTHER; note = 2'-O-methoxyethyl-adenosine
  modified_base 17: mod_base = OTHER; note = 2'-O-methoxyethyl-adenosine
  modified_base 18: mod_base = OTHER; note = 2'-O-methoxyethyl-thymidine
  modified_base 19: mod_base = OTHER; note = 2'-O-methoxyethyl-adenosine
  modified_base 20: mod_base = OTHER; note = 2'-O-methoxyethyl-adenosine
agaggctgtgatgggaataa

SEQ ID NO: 431 - RNA, 20 nt, synthetic construct
  source 1..20: mol_type = other RNA
  modified_base 1: mod_base = OTHER; note = 2'-O-methoxyethyl-thymidine
  modified_base 2: mod_base = OTHER; note = 2'-O-methoxyethyl-adenosine
  modified_base 3: mod_base = OTHER; note = 2'-O-methoxyethyl-guanosine
  modified_base 4: mod_base = OTHER; note = 2'-O-methoxyethyl-adenosine
  modified_base 5: mod_base = OTHER; note = 2'-O-methoxyethyl-guanosine
  modified_base 6: mod_base = OTHER; note = 2'-O-methoxyethyl-guanosine
  modified_base 7: mod_base = OTHER; note = 2'-O-methoxyethyl-5'-methylcytidine
  modified_base 8: mod_base = OTHER; note = 2'-O-methoxyethyl-thymidine
  modified_base 9: mod_base = OTHER; note = 2'-O-methoxyethyl-guanosine
  modified_base 10: mod_base = OTHER; note = 2'-O-methoxyethyl-thymidine
  modified_base 11: mod_base = OTHER; note = 2'-O-methoxyethyl-guanosine
  modified_base 12: mod_base = OTHER; note = 2'-O-methoxyethyl-adenosine
  modified_base 13: mod_base = OTHER; note = 2'-O-methoxyethyl-thymidine
  modified_base 14: mod_base = OTHER; note = 2'-O-methoxyethyl-guanosine
  modified_base 15: mod_base = OTHER; note = 2'-O-methoxyethyl-guanosine
  modified_base 16: mod_base = OTHER; note = 2'-O-methoxyethyl-guanosine
  modified_base 17: mod_base = OTHER; note = 2'-O-methoxyethyl-adenosine
  modified_base 18: mod_base = OTHER; note = 2'-O-methoxyethyl-adenosine
  modified_base 19: mod_base = OTHER; note = 2'-O-methoxyethyl-thymidine
  modified_base 20: mod_base = OTHER; note = 2'-O-methoxyethyl-adenosine
tagaggctgtgatgggaata

SEQ ID NO: 432 - RNA, 20 nt, synthetic construct
  source 1..20: mol_type = other RNA
  modified_base 1: mod_base = OTHER; note = 2'-O-methoxyethyl-adenosine
  modified_base 2: mod_base = OTHER; note = 2'-O-methoxyethyl-thymidine
  modified_base 3: mod_base = OTHER; note = 2'-O-methoxyethyl-adenosine
  modified_base 4: mod_base = OTHER; note = 2'-O-methoxyethyl-guanosine
  modified_base 5: mod_base = OTHER; note = 2'-O-methoxyethyl-adenosine
  modified_base 6: mod_base = OTHER; note = 2'-O-methoxyethyl-guanosine
  modified_base 7: mod_base = OTHER; note = 2'-O-methoxyethyl-guanosine
  modified_base 8: mod_base = OTHER; note = 2'-O-methoxyethyl-5'-methylcytidine
  modified_base 9: mod_base = OTHER; note = 2'-O-methoxyethyl-thymidine
  modified_base 10: mod_base = OTHER; note = 2'-O-methoxyethyl-guanosine
  modified_base 11: mod_base = OTHER; note = 2'-O-methoxyethyl-thymidine
  modified_base 12: mod_base = OTHER; note = 2'-O-methoxyethyl-guanosine
  modified_base 13: mod_base = OTHER; note = 2'-O-methoxyethyl-adenosine
  modified_base 14: mod_base = OTHER; note = 2'-O-methoxyethyl-thymidine
  modified_base 15: mod_base = OTHER; note = 2'-O-methoxyethyl-guanosine
  modified_base 16: mod_base = OTHER; note = 2'-O-methoxyethyl-guanosine
  modified_base 17: mod_base = OTHER; note = 2'-O-methoxyethyl-guanosine
  modified_base 18: mod_base = OTHER; note = 2'-O-methoxyethyl-adenosine
  modified_base 19: mod_base = OTHER; note = 2'-O-methoxyethyl-adenosine
  modified_base 20: mod_base = OTHER; note = 2'-O-methoxyethyl-thymidine
atagaggctgtgatgggaat

SEQ ID NO: 433 - RNA, 20 nt, synthetic construct
  source 1..20: mol_type = other RNA
  modified_base 1: mod_base = OTHER; note = 2'-O-methoxyethyl-guanosine
  modified_base 2: mod_base = OTHER; note = 2'-O-methoxyethyl-adenosine
  modified_base 3: mod_base = OTHER; note = 2'-O-methoxyethyl-thymidine
  modified_base 4: mod_base = OTHER; note = 2'-O-methoxyethyl-adenosine
  modified_base 5: mod_base = OTHER; note = 2'-O-methoxyethyl-guanosine
  modified_base 6: mod_base = OTHER; note = 2'-O-methoxyethyl-adenosine
  modified_base 7: mod_base = OTHER; note = 2'-O-methoxyethyl-guanosine
  modified_base 8: mod_base = OTHER; note = 2'-O-methoxyethyl-guanosine
  modified_base 9: mod_base = OTHER; note = 2'-O-methoxyethyl-5'-methylcytidine
  modified_base 10: mod_base = OTHER; note = 2'-O-methoxyethyl-thymidine
  modified_base 11: mod_base = OTHER; note = 2'-O-methoxyethyl-guanosine
  modified_base 12: mod_base = OTHER; note = 2'-O-methoxyethyl-thymidine
  modified_base 13: mod_base = OTHER; note = 2'-O-methoxyethyl-guanosine
  modified_base 14: mod_base = OTHER; note = 2'-O-methoxyethyl-adenosine
  modified_base 15: mod_base = OTHER; note = 2'-O-methoxyethyl-thymidine
  modified_base 16: mod_base = OTHER; note = 2'-O-methoxyethyl-guanosine
  modified_base 17: mod_base = OTHER; note = 2'-O-methoxyethyl-guanosine
  modified_base 18: mod_base = OTHER; note = 2'-O-methoxyethyl-guanosine
  modified_base 19: mod_base = OTHER; note = 2'-O-methoxyethyl-adenosine
  modified_base 20: mod_base = OTHER; note = 2'-O-methoxyethyl-adenosine
gatagaggctgtgatgggaa

SEQ ID NO: 434 - RNA, 20 nt, synthetic construct
  source 1..20: mol_type = other RNA
  modified_base 1: mod_base = OTHER; note = 2'-O-methoxyethyl-adenosine
  modified_base 2: mod_base = OTHER; note = 2'-O-methoxyethyl-guanosine
  modified_base 3: mod_base = OTHER; note = 2'-O-methoxyethyl-adenosine
  modified_base 4: mod_base = OTHER; note = 2'-O-methoxyethyl-thymidine
  modified_base 5: mod_base = OTHER; note = 2'-O-methoxyethyl-adenosine
  modified_base 6: mod_base = OTHER; note = 2'-O-methoxyethyl-guanosine
  modified_base 7: mod_base = OTHER; note = 2'-O-methoxyethyl-adenosine
  modified_base 8: mod_base = OTHER; note = 2'-O-methoxyethyl-guanosine
  modified_base 9: mod_base = OTHER; note = 2'-O-methoxyethyl-guanosine
  modified_base 10: mod_base = OTHER; note = 2'-O-methoxyethyl-5'-methylcytidine
  modified_base 11: mod_base = OTHER; note = 2'-O-methoxyethyl-thymidine
  modified_base 12: mod_base = OTHER; note = 2'-O-methoxyethyl-guanosine
  modified_base 13: mod_base = OTHER; note = 2'-O-methoxyethyl-thymidine
  modified_base 14: mod_base = OTHER; note = 2'-O-methoxyethyl-guanosine
  modified_base 15: mod_base = OTHER; note = 2'-O-methoxyethyl-adenosine
  modified_base 16: mod_base = OTHER; note = 2'-O-methoxyethyl-thymidine
  modified_base 17: mod_base = OTHER; note = 2'-O-methoxyethyl-guanosine
  modified_base 18: mod_base = OTHER; note = 2'-O-methoxyethyl-guanosine
  modified_base 19: mod_base = OTHER; note = 2'-O-methoxyethyl-guanosine
  modified_base 20: mod_base = OTHER; note = 2'-O-methoxyethyl-adenosine
agatagaggctgtgatggga

SEQ ID NO: 435 - RNA, 20 nt, synthetic construct
  source 1..20: mol_type = other RNA
  modified_base 1: mod_base = OTHER; note = 2'-O-methoxyethyl-adenosine
  modified_base 2: mod_base = OTHER; note = 2'-O-methoxyethyl-adenosine
  modified_base 3: mod_base = OTHER; note = 2'-O-methoxyethyl-guanosine
  modified_base 4: mod_base = OTHER; note = 2'-O-methoxyethyl-adenosine
  modified_base 5: mod_base = OTHER; note = 2'-O-methoxyethyl-thymidine
  modified_base 6: mod_base = OTHER; note = 2'-O-methoxyethyl-adenosine
  modified_base 7: mod_base = OTHER; note = 2'-O-methoxyethyl-guanosine
  modified_base 8: mod_base = OTHER; note = 2'-O-methoxyethyl-adenosine
  modified_base 9: mod_base = OTHER; note = 2'-O-methoxyethyl-guanosine
  modified_base 10: mod_base = OTHER; note = 2'-O-methoxyethyl-guanosine
  modified_base 11: mod_base = OTHER; note = 2'-O-methoxyethyl-5'-methylcytidine
  modified_base 12: mod_base = OTHER; note = 2'-O-methoxyethyl-thymidine
  modified_base 13: mod_base = OTHER; note = 2'-O-methoxyethyl-guanosine
  modified_base 14: mod_base = OTHER; note = 2'-O-methoxyethyl-thymidine
  modified_base 15: mod_base = OTHER; note = 2'-O-methoxyethyl-guanosine
  modified_base 16: mod_base = OTHER; note = 2'-O-methoxyethyl-adenosine
  modified_base 17: mod_base = OTHER; note = 2'-O-methoxyethyl-thymidine
  modified_base 18: mod_base = OTHER; note = 2'-O-methoxyethyl-guanosine
  modified_base 19: mod_base = OTHER; note = 2'-O-methoxyethyl-guanosine
  modified_base 20: mod_base = OTHER; note = 2'-O-methoxyethyl-guanosine
aagatagaggctgtgatggg

SEQ ID NO: 436 - RNA, 16 nt, synthetic construct
  source 1..16: mol_type = other RNA
  modified_base 1: mod_base = OTHER; note = 2'-O-methoxyethyl-5'-methylcytidine
  modified_base 2: mod_base = OTHER; note = 2'-O-methoxyethyl-thymidine
  modified_base 3: mod_base = OTHER; note = 2'-O-methoxyethyl-guanosine
  modified_base 4: mod_base = OTHER; note = 2'-O-methoxyethyl-thymidine
  modified_base 5: mod_base = OTHER; note = 2'-O-methoxyethyl-guanosine
  modified_base 6: mod_base = OTHER; note = 2'-O-methoxyethyl-adenosine
  modified_base 7: mod_base = OTHER; note = 2'-O-methoxyethyl-thymidine
  modified_base 8: mod_base = OTHER; note = 2'-O-methoxyethyl-guanosine
  modified_base 9: mod_base = OTHER; note = 2'-O-methoxyethyl-guanosine
  modified_base 10: mod_base = OTHER; note = 2'-O-methoxyethyl-guanosine
  modified_base 11: mod_base = OTHER; note = 2'-O-methoxyethyl-adenosine
  modified_base 12: mod_base = OTHER; note = 2'-O-methoxyethyl-adenosine
  modified_base 13: mod_base = OTHER; note = 2'-O-methoxyethyl-thymidine
  modified_base 14: mod_base = OTHER; note = 2'-O-methoxyethyl-adenosine
  modified_base 15: mod_base = OTHER; note = 2'-O-methoxyethyl-adenosine
  modified_base 16: mod_base = OTHER; note = 2'-O-methoxyethyl-adenosine
ctgtgatgggaataaa

SEQ ID NO: 437 - RNA, 16 nt, synthetic construct
  source 1..16: mol_type = other RNA
  modified_base 1: mod_base = OTHER; note = 2'-O-methoxyethyl-guanosine
  modified_base 2: mod_base = OTHER; note = 2'-O-methoxyethyl-5'-methylcytidine
  modified_base 3: mod_base = OTHER; note = 2'-O-methoxyethyl-thymidine
  modified_base 4: mod_base = OTHER; note = 2'-O-methoxyethyl-guanosine
  modified_base 5: mod_base = OTHER; note = 2'-O-methoxyethyl-thymidine
  modified_base 6: mod_base = OTHER; note = 2'-O-methoxyethyl-guanosine
  modified_base 7: mod_base = OTHER; note = 2'-O-methoxyethyl-adenosine
  modified_base 8: mod_base = OTHER; note = 2'-O-methoxyethyl-thymidine
  modified_base 9: mod_base = OTHER; note = 2'-O-methoxyethyl-guanosine
  modified_base 10: mod_base = OTHER; note = 2'-O-methoxyethyl-guanosine
  modified_base 11: mod_base = OTHER; note = 2'-O-methoxyethyl-guanosine
  modified_base 12: mod_base = OTHER; note = 2'-O-methoxyethyl-adenosine
  modified_base 13: mod_base = OTHER; note = 2'-O-methoxyethyl-adenosine
  modified_base 14: mod_base = OTHER; note = 2'-O-methoxyethyl-thymidine
  modified_base 15: mod_base = OTHER; note = 2'-O-methoxyethyl-adenosine
  modified_base 16: mod_base = OTHER; note = 2'-O-methoxyethyl-adenosine
gctgtgatgggaataa

SEQ ID NO: 438 - RNA, 16 nt, synthetic construct
  source 1..16: mol_type = other RNA
  modified_base 1: mod_base = OTHER; note = 2'-O-methoxyethyl-guanosine
  modified_base 2: mod_base = OTHER; note = 2'-O-methoxyethyl-guanosine
  modified_base 3: mod_base = OTHER; note = 2'-O-methoxyethyl-5'-methylcytidine
  modified_base 4: mod_base = OTHER; note = 2'-O-methoxyethyl-thymidine
  modified_base 5: mod_base = OTHER; note = 2'-O-methoxyethyl-guanosine
  modified_base 6: mod_base = OTHER; note = 2'-O-methoxyethyl-thymidine
  modified_base 7: mod_base = OTHER; note = 2'-O-methoxyethyl-guanosine
  modified_base 8: mod_base = OTHER; note = 2'-O-methoxyethyl-adenosine
  modified_base 9: mod_base = OTHER; note = 2'-O-methoxyethyl-thymidine
  modified_base 10: mod_base = OTHER; note = 2'-O-methoxyethyl-guanosine
  modified_base 11: mod_base = OTHER; note = 2'-O-methoxyethyl-guanosine
  modified_base 12: mod_base = OTHER; note = 2'-O-methoxyethyl-guanosine
  modified_base 13: mod_base = OTHER; note = 2'-O-methoxyethyl-adenosine
  modified_base 14: mod_base = OTHER; note = 2'-O-methoxyethyl-adenosine
  modified_base 15: mod_base = OTHER; note = 2'-O-methoxyethyl-thymidine
  modified_base 16: mod_base = OTHER; note = 2'-O-methoxyethyl-adenosine
ggctgtgatgggaata

SEQ ID NO: 439 - RNA, 16 nt, synthetic construct
  source 1..16: mol_type = other RNA
  modified_base 1: mod_base = OTHER; note = 2'-O-methoxyethyl-adenosine
  modified_base 2: mod_base = OTHER; note = 2'-O-methoxyethyl-guanosine
  modified_base 3: mod_base = OTHER; note = 2'-O-methoxyethyl-guanosine
  modified_base 4: mod_base = OTHER; note = 2'-O-methoxyethyl-5'-methylcytidine
  modified_base 5: mod_base = OTHER; note = 2'-O-methoxyethyl-thymidine
  modified_base 6: mod_base = OTHER; note = 2'-O-methoxyethyl-guanosine
  modified_base 7: mod_base = OTHER; note = 2'-O-methoxyethyl-thymidine
  modified_base 8: mod_base = OTHER; note = 2'-O-methoxyethyl-guanosine
  modified_base 9: mod_base = OTHER; note = 2'-O-methoxyethyl-adenosine
  modified_base 10: mod_base = OTHER; note = 2'-O-methoxyethyl-thymidine
  modified_base 11: mod_base = OTHER; note = 2'-O-methoxyethyl-guanosine
  modified_base 12: mod_base = OTHER; note = 2'-O-methoxyethyl-guanosine
  modified_base 13: mod_base = OTHER; note = 2'-O-methoxyethyl-guanosine
  modified_base 14: mod_base = OTHER; note = 2'-O-methoxyethyl-adenosine
  modified_base 15: mod_base = OTHER; note = 2'-O-methoxyethyl-adenosine
  modified_base 16: mod_base = OTHER; note = 2'-O-methoxyethyl-thymidine
aggctgtgatgggaat

SEQ ID NO: 440 - RNA, 16 nt, synthetic construct
  source 1..16: mol_type = other RNA
  modified_base 1: mod_base = OTHER; note = 2'-O-methoxyethyl-guanosine
  modified_base 2: mod_base = OTHER; note = 2'-O-methoxyethyl-adenosine
  modified_base 3: mod_base = OTHER; note = 2'-O-methoxyethyl-guanosine
  modified_base 4: mod_base = OTHER; note = 2'-O-methoxyethyl-guanosine
  modified_base 5: mod_base = OTHER; note = 2'-O-methoxyethyl-5'-methylcytidine
  modified_base 6: mod_base = OTHER; note = 2'-O-methoxyethyl-thymidine
  modified_base 7: mod_base = OTHER; note = 2'-O-methoxyethyl-guanosine
  modified_base 8: mod_base = OTHER; note = 2'-O-methoxyethyl-thymidine
  modified_base 9: mod_base = OTHER; note = 2'-O-methoxyethyl-guanosine
  modified_base 10: mod_base = OTHER; note = 2'-O-methoxyethyl-adenosine
  modified_base 11: mod_base = OTHER; note = 2'-O-methoxyethyl-thymidine
  modified_base 12: mod_base = OTHER; note = 2'-O-methoxyethyl-guanosine
  modified_base 13: mod_base = OTHER; note = 2'-O-methoxyethyl-guanosine
  modified_base 14: mod_base = OTHER; note = 2'-O-methoxyethyl-guanosine
  modified_base 15: mod_base = OTHER; note = 2'-O-methoxyethyl-adenosine
  modified_base 16: mod_base = OTHER; note = 2'-O-methoxyethyl-adenosine
gaggctgtgatgggaa

SEQ ID NO: 441 - RNA, 16 nt, synthetic construct
  source 1..16: mol_type = other RNA
  modified_base 1: mod_base = OTHER; note = 2'-O-methoxyethyl-adenosine
  modified_base 2: mod_base = OTHER; note = 2'-O-methoxyethyl-guanosine
  modified_base 3: mod_base = OTHER; note = 2'-O-methoxyethyl-adenosine
  modified_base 4: mod_base = OTHER; note = 2'-O-methoxyethyl-guanosine
  modified_base 5: mod_base = OTHER; note = 2'-O-methoxyethyl-guanosine
  modified_base 6: mod_base = OTHER; note = 2'-O-methoxyethyl-5'-methylcytidine
  modified_base 7: mod_base = OTHER; note = 2'-O-methoxyethyl-thymidine
  modified_base 8: mod_base = OTHER; note = 2'-O-methoxyethyl-guanosine
  modified_base 9: mod_base = OTHER; note = 2'-O-methoxyethyl-thymidine
  modified_base 10: mod_base = OTHER; note = 2'-O-methoxyethyl-guanosine
  modified_base 11: mod_base = OTHER; note = 2'-O-methoxyethyl-adenosine
  modified_base 12: mod_base = OTHER; note = 2'-O-methoxyethyl-thymidine
  modified_base 13: mod_base = OTHER; note = 2'-O-methoxyethyl-guanosine
  modified_base 14: mod_base = OTHER; note = 2'-O-methoxyethyl-guanosine
  modified_base 15: mod_base = OTHER; note = 2'-O-methoxyethyl-guanosine
  modified_base 16: mod_base = OTHER; note = 2'-O-methoxyethyl-adenosine
agaggctgtgatggga

SEQ ID NO: 442 - RNA, 16 nt, synthetic construct
  source 1..16: mol_type = other RNA
  modified_base 1: mod_base = OTHER; note = 2'-O-methoxyethyl-thymidine
  modified_base 2: mod_base = OTHER; note = 2'-O-methoxyethyl-adenosine
  modified_base 3: mod_base = OTHER; note = 2'-O-methoxyethyl-guanosine
  modified_base 4: mod_base = OTHER; note = 2'-O-methoxyethyl-adenosine
  modified_base 5: mod_base = OTHER; note = 2'-O-methoxyethyl-guanosine
  modified_base 6: mod_base = OTHER; note = 2'-O-methoxyethyl-guanosine
  modified_base 7: mod_base = OTHER; note = 2'-O-methoxyethyl-5'-methylcytidine
  modified_base 8: mod_base = OTHER; note = 2'-O-methoxyethyl-thymidine
  modified_base 9: mod_base = OTHER; note = 2'-O-methoxyethyl-guanosine
  modified_base 10: mod_base = OTHER; note = 2'-O-methoxyethyl-thymidine
  modified_base 11: mod_base = OTHER; note = 2'-O-methoxyethyl-guanosine
  modified_base 12: mod_base = OTHER; note = 2'-O-methoxyethyl-adenosine
  modified_base 13: mod_base = OTHER; note = 2'-O-methoxyethyl-thymidine
  modified_base 14: mod_base = OTHER; note = 2'-O-methoxyethyl-guanosine
  modified_base 15: mod_base = OTHER; note = 2'-O-methoxyethyl-guanosine
  modified_base 16: mod_base = OTHER; note = 2'-O-methoxyethyl-guanosine
tagaggctgtgatggg

SEQ ID NO: 443 - RNA, 16 nt, synthetic construct
  source 1..16: mol_type = other RNA
  modified_base 1: mod_base = OTHER; note = 2'-O-methoxyethyl-adenosine
  modified_base 2: mod_base = OTHER; note = 2'-O-methoxyethyl-thymidine
  modified_base 3: mod_base = OTHER; note = 2'-O-methoxyethyl-adenosine
  modified_base 4: mod_base = OTHER; note = 2'-O-methoxyethyl-guanosine
  modified_base 5: mod_base = OTHER; note = 2'-O-methoxyethyl-adenosine
  modified_base 6: mod_base = OTHER; note = 2'-O-methoxyethyl-guanosine
  modified_base 7: mod_base = OTHER; note = 2'-O-methoxyethyl-guanosine
  modified_base 8: mod_base = OTHER; note = 2'-O-methoxyethyl-5'-methylcytidine
  modified_base 9: mod_base = OTHER; note = 2'-O-methoxyethyl-thymidine
  modified_base 10: mod_base = OTHER; note = 2'-O-methoxyethyl-guanosine
  modified_base 11: mod_base = OTHER; note = 2'-O-methoxyethyl-thymidine
  modified_base 12: mod_base = OTHER; note = 2'-O-methoxyethyl-guanosine
  modified_base 13: mod_base = OTHER; note = 2'-O-methoxyethyl-adenosine
  modified_base 14: mod_base = OTHER; note = 2'-O-methoxyethyl-thymidine
  modified_base 15: mod_base = OTHER; note = 2'-O-methoxyethyl-guanosine
  modified_base 16: mod_base = OTHER; note = 2'-O-methoxyethyl-guanosine
atagaggctgtgatgg

SEQ ID NO: 444 - RNA, 16 nt, synthetic construct
  source 1..16: mol_type = other RNA
  modified_base 1: mod_base = OTHER; note = 2'-O-methoxyethyl-guanosine
  modified_base 2: mod_base = OTHER; note = 2'-O-methoxyethyl-adenosine
  modified_base 3: mod_base = OTHER; note = 2'-O-methoxyethyl-thymidine
  modified_base 4: mod_base = OTHER; note = 2'-O-methoxyethyl-adenosine
  modified_base 5: mod_base = OTHER; note = 2'-O-methoxyethyl-guanosine
  modified_base 6: mod_base = OTHER; note = 2'-O-methoxyethyl-adenosine
  modified_base 7: mod_base = OTHER; note = 2'-O-methoxyethyl-guanosine
  modified_base 8: mod_base = OTHER; note = 2'-O-methoxyethyl-guanosine
  modified_base 9: mod_base = OTHER; note = 2'-O-methoxyethyl-5'-methylcytidine
  modified_base 10: mod_base = OTHER; note = 2'-O-methoxyethyl-thymidine
  modified_base 11: mod_base = OTHER; note = 2'-O-methoxyethyl-guanosine
  modified_base 12: mod_base = OTHER; note = 2'-O-methoxyethyl-thymidine
  modified_base 13: mod_base = OTHER; note = 2'-O-methoxyethyl-guanosine
  modified_base 14: mod_base = OTHER; note = 2'-O-methoxyethyl-adenosine
  modified_base 15: mod_base = OTHER; note = 2'-O-methoxyethyl-thymidine
  modified_base 16: mod_base = OTHER; note = 2'-O-methoxyethyl-guanosine
gatagaggctgtgatg

SEQ ID NO: 445 - RNA, 16 nt, synthetic construct
  source 1..16: mol_type = other RNA
  modified_base 1: mod_base = OTHER; note = 2'-O-methoxyethyl-adenosine
  modified_base 2: mod_base = OTHER; note = 2'-O-methoxyethyl-guanosine
  modified_base 3: mod_base = OTHER; note = 2'-O-methoxyethyl-adenosine
  modified_base 4: mod_base = OTHER; note = 2'-O-methoxyethyl-thymidine
  modified_base 5: mod_base = OTHER; note = 2'-O-methoxyethyl-adenosine
  modified_base 6: mod_base = OTHER; note = 2'-O-methoxyethyl-guanosine
  modified_base 7: mod_base = OTHER; note = 2'-O-methoxyethyl-adenosine
  modified_base 8: mod_base = OTHER; note = 2'-O-methoxyethyl-guanosine
  modified_base 9: mod_base = OTHER; note = 2'-O-methoxyethyl-guanosine
  modified_base 10: mod_base = OTHER; note = 2'-O-methoxyethyl-5'-methylcytidine
  modified_base 11: mod_base = OTHER; note = 2'-O-methoxyethyl-thymidine
  modified_base 12: mod_base = OTHER; note = 2'-O-methoxyethyl-guanosine
  modified_base 13: mod_base = OTHER; note = 2'-O-methoxyethyl-thymidine
  modified_base 14: mod_base = OTHER; note = 2'-O-methoxyethyl-guanosine
  modified_base 15: mod_base = OTHER; note = 2'-O-methoxyethyl-adenosine
  modified_base 16: mod_base = OTHER; note = 2'-O-methoxyethyl-thymidine
agatagaggctgtgat

SEQ ID NO: 446 - RNA, 16 nt, synthetic construct
  source 1..16: mol_type = other RNA
  modified_base 1: mod_base = OTHER; note = 2'-O-methoxyethyl-adenosine
  modified_base 2: mod_base = OTHER; note = 2'-O-methoxyethyl-adenosine
  modified_base 3: mod_base = OTHER; note = 2'-O-methoxyethyl-guanosine
  modified_base 4: mod_base = OTHER; note = 2'-O-methoxyethyl-adenosine
  modified_base 5: mod_base = OTHER; note = 2'-O-methoxyethyl-thymidine
  modified_base 6: mod_base = OTHER; note = 2'-O-methoxyethyl-adenosine
  modified_base 7: mod_base = OTHER; note = 2'-O-methoxyethyl-guanosine
  modified_base 8: mod_base = OTHER; note = 2'-O-methoxyethyl-adenosine
  modified_base 9: mod_base = OTHER; note = 2'-O-methoxyethyl-guanosine
  modified_base 10: mod_base = OTHER; note = 2'-O-methoxyethyl-guanosine
  modified_base 11: mod_base = OTHER; note = 2'-O-methoxyethyl-5'-methylcytidine
  modified_base 12: mod_base = OTHER; note = 2'-O-methoxyethyl-thymidine
  modified_base 13: mod_base = OTHER; note = 2'-O-methoxyethyl-guanosine
  modified_base 14: mod_base = OTHER; note = 2'-O-methoxyethyl-thymidine
  modified_base 15: mod_base = OTHER; note = 2'-O-methoxyethyl-guanosine
  modified_base 16: mod_base = OTHER; note = 2'-O-methoxyethyl-adenosine
aagatagaggctgtga

SEQ ID NO: 447 - RNA, 18 nt, synthetic construct
  source 1..18: mol_type = other RNA
  modified_base 1: mod_base = OTHER; note = 2'-O-methoxyethyl-adenosine
  modified_base 2: mod_base = OTHER; note = 2'-O-methoxyethyl-guanosine
  modified_base 3: mod_base = OTHER; note = 2'-O-methoxyethyl-guanosine
  modified_base 4: mod_base = OTHER; note = 2'-O-methoxyethyl-5'-methylcytidine
  modified_base 5: mod_base = OTHER; note = 2'-O-methoxyethyl-thymidine
  modified_base 6: mod_base = OTHER; note = 2'-O-methoxyethyl-guanosine
  modified_base 7: mod_base = OTHER; note = 2'-O-methoxyethyl-thymidine
  modified_base 8: mod_base = OTHER; note = 2'-O-methoxyethyl-guanosine
  modified_base 9: mod_base = OTHER; note = 2'-O-methoxyethyl-adenosine
  modified_base 10: mod_base = OTHER; note = 2'-O-methoxyethyl-thymidine
  modified_base 11: mod_base = OTHER; note = 2'-O-methoxyethyl-guanosine
  modified_base 12: mod_base = OTHER; note = 2'-O-methoxyethyl-thymidine
  modified_base 13: mod_base = OTHER; note = 2'-O-methoxyethyl-guanosine
  modified_base 14: mod_base = OTHER; note = 2'-O-methoxyethyl-adenosine
  modified_base 15: mod_base = OTHER; note = 2'-O-methoxyethyl-adenosine
  modified_base 16: mod_base = OTHER; note = 2'-O-methoxyethyl-thymidine
  modified_base 17: mod_base = OTHER; note = 2'-O-methoxyethyl-adenosine
  modified_base 18: mod_base = OTHER; note = 2'-O-methoxyethyl-adenosine
aggctgtgatgtgaataa

SEQ ID NO: 448 - RNA, 18 nt, synthetic construct
  source 1..18: mol_type = other RNA
  modified_base 1: mod_base = OTHER; note = 2'-O-methoxyethyl-adenosine
  modified_base 2: mod_base = OTHER; note = Locked nucleic acid
  modified_base 3: mod_base = OTHER; note = 2'-O-methoxyethyl-guanosine
  modified_base 4: mod_base = OTHER; note = 2'-O-methoxyethyl-5'-methylcytidine
  modified_base 5: mod_base = OTHER; note = 2'-O-methoxyethyl-thymidine
  modified_base 6: mod_base = OTHER; note = Locked nucleic acid
  modified_base 7: mod_base = OTHER; note = 2'-O-methoxyethyl-thymidine
  modified_base 8: mod_base = OTHER; note = 2'-O-methoxyethyl-guanosine
  modified_base 9: mod_base = OTHER; note = 2'-O-methoxyethyl-adenosine
  modified_base 10: mod_base = OTHER; note = 2'-O-methoxyethyl-thymidine
  modified_base 11: mod_base = OTHER; note = 2'-O-methoxyethyl-guanosine
  modified_base 12: mod_base = OTHER; note = 2'-O-methoxyethyl-thymidine
  modified_base 13: mod_base = OTHER; note = Locked nucleic acid
  modified_base 14: mod_base = OTHER; note = 2'-O-methoxyethyl-adenosine
  modified_base 15: mod_base = OTHER; note = 2'-O-methoxyethyl-adenosine
  modified_base 16: mod_base = OTHER; note = 2'-O-methoxyethyl-thymidine
  modified_base 17: mod_base = OTHER; note = Locked nucleic acid
  modified_base 18: mod_base = OTHER; note = 2'-O-methoxyethyl-adenosine
aggctgtgatgtgaataa

SEQ ID NO: 449 - RNA, 18 nt, synthetic construct
  source 1..18: mol_type = other RNA
  modified_base 1: mod_base = OTHER; note = 2'-O-methoxyethyl-adenosine
  modified_base 2: mod_base = OTHER; note = Locked nucleic acid
  modified_base 3: mod_base = OTHER; note = 2'-O-methoxyethyl-guanosine
  modified_base 4: mod_base = OTHER; note = 2'-O-methoxyethyl-5'-methylcytidine
  modified_base 5: mod_base = OTHER; note = 2'-O-methoxyethyl-thymidine
  modified_base 6: mod_base = OTHER; note = Locked nucleic acid
  modified_base 7: mod_base = OTHER; note = 2'-O-methoxyethyl-thymidine
  modified_base 8: mod_base = OTHER; note = 2'-O-methoxyethyl-guanosine
  modified_base 9: mod_base = OTHER; note = 2'-O-methoxyethyl-adenosine
  modified_base 10: mod_base = OTHER; note = 2'-O-methoxyethyl-thymidine
  modified_base 11: mod_base = OTHER; note = Locked nucleic acid
  modified_base 12: mod_base = OTHER; note = 2'-O-methoxyethyl-thymidine
  modified_base 13: mod_base = OTHER; note = Locked nucleic acid
  modified_base 14: mod_base = OTHER; note = 2'-O-methoxyethyl-adenosine
  modified_base 15: mod_base = OTHER; note = 2'-O-methoxyethyl-adenosine
  modified_base 16: mod_base = OTHER; note = 2'-O-methoxyethyl-thymidine
  modified_base 17: mod_base = OTHER; note = Locked nucleic acid
  modified_base 18: mod_base = OTHER; note = 2'-O-methoxyethyl-adenosine
aggctgtgatgtgaataa

SEQ ID NO: 450 - RNA, 18 nt, synthetic construct
  source 1..18: mol_type = other RNA
  modified_base 1: mod_base = OTHER; note = 2'-O-methoxyethyl-adenosine
  modified_base 2: mod_base = OTHER; note = 2'-O-methoxyethyl-guanosine
  modified_base 3: mod_base = OTHER; note = 2'-O-methoxyethyl-adenosine
  modified_base 4: mod_base = OTHER; note = 2'-O-methoxyethyl-guanosine
  modified_base 5: mod_base = OTHER; note = 2'-O-methoxyethyl-guanosine
  modified_base 6: mod_base = OTHER; note = 2'-O-methoxyethyl-5'-methylcytidine
  modified_base 7: mod_base = OTHER; note = 2'-O-methoxyethyl-thymidine
  modified_base 8: mod_base = OTHER; note = 2'-O-methoxyethyl-guanosine
  modified_base 9: mod_base = OTHER; note = 2'-O-methoxyethyl-thymidine
  modified_base 10: mod_base = OTHER; note = 2'-O-methoxyethyl-guanosine
  modified_base 11: mod_base = OTHER; note = 2'-O-methoxyethyl-adenosine
  modified_base 12: mod_base = OTHER; note = 2'-O-methoxyethyl-thymidine
  modified_base 13: mod_base = OTHER; note = 2'-O-methoxyethyl-guanosine
  modified_base 14: mod_base = OTHER; note = 2'-O-methoxyethyl-thymidine
  modified_base 15: mod_base = OTHER; note = 2'-O-methoxyethyl-guanosine
  modified_base 16: mod_base = OTHER; note = 2'-O-methoxyethyl-adenosine
  modified_base 17: mod_base = OTHER; note = 2'-O-methoxyethyl-adenosine
  modified_base 18: mod_base = OTHER; note = 2'-O-methoxyethyl-thymidine
agaggctgtgatgtgaat

SEQ ID NO: 451 - RNA, 18 nt, synthetic construct
  source 1..18: mol_type = other RNA
  modified_base 1: mod_base = OTHER; note = 2'-O-methoxyethyl-adenosine
  modified_base 2: mod_base = OTHER; note = Locked nucleic acid
  modified_base 3: mod_base = OTHER; note = 2'-O-methoxyethyl-adenosine
  modified_base 4: mod_base = OTHER; note = 2'-O-methoxyethyl-guanosine
  modified_base 5: mod_base = OTHER; note = 2'-O-methoxyethyl-guanosine
  modified_base 6: mod_base = OTHER; note = 5'-methylcytidine locked nucleic acid
  modified_base 7: mod_base = OTHER; note = 2'-O-methoxyethyl-thymidine
  modified_base 8: mod_base = OTHER; note = 2'-O-methoxyethyl-guanosine
  modified_base 9: mod_base = OTHER; note = 2'-O-methoxyethyl-thymidine
  modified_base 10: mod_base = OTHER; note = 2'-O-methoxyethyl-guanosine
  modified_base 11: mod_base = OTHER; note = 2'-O-methoxyethyl-adenosine
  modified_base 12: mod_base = OTHER; note = 2'-O-methoxyethyl-thymidine
  modified_base 13: mod_base = OTHER; note = Locked nucleic acid
  modified_base 14: mod_base = OTHER; note = 2'-O-methoxyethyl-thymidine
  modified_base 15: mod_base = OTHER; note = 2'-O-methoxyethyl-guanosine
  modified_base 16: mod_base = OTHER; note = 2'-O-methoxyethyl-adenosine
  modified_base 17: mod_base = OTHER; note = Locked nucleic acid
  modified_base 18: mod_base = OTHER; note = 2'-O-methoxyethyl-thymidine
agaggctgtgatgtgaat

SEQ ID NO: 452 - RNA, 18 nt, synthetic construct
  source 1..18: mol_type = other RNA
  modified_base 1: mod_base = OTHER; note = 2'-O-methoxyethyl-adenosine
  modified_base 2: mod_base = OTHER; note = Locked nucleic acid
  modified_base 3: mod_base = OTHER; note = 2'-O-methoxyethyl-adenosine
  modified_base 4: mod_base = OTHER; note = 2'-O-methoxyethyl-guanosine
  modified_base 5: mod_base = OTHER; note = 2'-O-methoxyethyl-guanosine
  modified_base 6: mod_base = OTHER; note = 5'-methylcytidine locked nucleic acid
  modified_base 7: mod_base = OTHER; note = 2'-O-methoxyethyl-thymidine
  modified_base 8: mod_base = OTHER; note = 2'-O-methoxyethyl-guanosine
  modified_base 9: mod_base = OTHER; note = 2'-O-methoxyethyl-thymidine
  modified_base 10: mod_base = OTHER; note = 2'-O-methoxyethyl-guanosine
  modified_base 11: mod_base = OTHER; note = 2'-O-methoxyethyl-adenosine
  modified_base 12: mod_base = OTHER; note = 2'-O-methoxyethyl-thymidine
  modified_base 13: mod_base = OTHER; note = Locked nucleic acid
  modified_base 14: mod_base = OTHER; note = 2'-O-methoxyethyl-thymidine
  modified_base 15: mod_base = OTHER; note = Locked nucleic acid
  modified_base 16: mod_base = OTHER; note = 2'-O-methoxyethyl-adenosine
  modified_base 17: mod_base = OTHER; note = Locked nucleic acid
  modified_base 18: mod_base = OTHER; note = 2'-O-methoxyethyl-thymidine
agaggctgtgatgtgaat

SEQ ID NO: 453 - RNA, 18 nt, synthetic construct
  source 1..18: mol_type = other RNA
  modified_base 1: mod_base = OTHER; note = 2'-O-methoxyethyl-thymidine
  modified_base 2: mod_base = OTHER; note = 2'-O-methoxyethyl-adenosine
  modified_base 3: mod_base = OTHER; note = 2'-O-methoxyethyl-guanosine
  modified_base 4: mod_base = OTHER; note = 2'-O-methoxyethyl-adenosine
  modified_base 5: mod_base = OTHER; note = 2'-O-methoxyethyl-guanosine
  modified_base 6: mod_base = OTHER; note = 2'-O-methoxyethyl-guanosine
  modified_base 7: mod_base = OTHER; note = 2'-O-methoxyethyl-5'-methylcytidine
  modified_base 8: mod_base = OTHER; note = 2'-O-methoxyethyl-thymidine
  modified_base 9: mod_base = OTHER; note = 2'-O-methoxyethyl-guanosine
  modified_base 10: mod_base = OTHER; note = 2'-O-methoxyethyl-thymidine
  modified_base 11: mod_base = OTHER; note = 2'-O-methoxyethyl-guanosine
  modified_base 12: mod_base = OTHER; note = 2'-O-methoxyethyl-adenosine
  modified_base 13: mod_base = OTHER; note = 2'-O-methoxyethyl-thymidine
  modified_base 14: mod_base = OTHER; note = 2'-O-methoxyethyl-guanosine
  modified_base 15: mod_base = OTHER; note = 2'-O-methoxyethyl-thymidine
  modified_base 16: mod_base = OTHER; note = 2'-O-methoxyethyl-guanosine
  modified_base 17: mod_base = OTHER; note = 2'-O-methoxyethyl-adenosine
  modified_base 18: mod_base = OTHER; note = 2'-O-methoxyethyl-adenosine
tagaggctgtgatgtgaa

SEQ ID NO: 454 - RNA, 18 nt, synthetic construct
  source 1..18: mol_type = other RNA
  modified_base 1: mod_base = OTHER; note = 2'-O-methoxyethyl-thymidine
  modified_base 2: mod_base = OTHER; note = Locked nucleic acid
  modified_base 3: mod_base = OTHER; note = 2'-O-methoxyethyl-guanosine
  modified_base 4: mod_base = OTHER; note = 2'-O-methoxyethyl-adenosine
  modified_base 5: mod_base = OTHER; note = 2'-O-methoxyethyl-guanosine
  modified_base 6: mod_base = OTHER; note = Locked nucleic acid
  modified_base 7: mod_base = OTHER; note = 2'-O-methoxyethyl-5'-methylcytidine
  modified_base 8: mod_base = OTHER; note = 2'-O-methoxyethyl-thymidine
  modified_base 9: mod_base = OTHER; note = 2'-O-methoxyethyl-guanosine
  modified_base 10: mod_base = OTHER; note = 2'-O-methoxyethyl-thymidine
  modified_base 11: mod_base = OTHER; note = 2'-O-methoxyethyl-guanosine
  modified_base 12: mod_base = OTHER; note = 2'-O-methoxyethyl-adenosine
  modified_base 13: mod_base = OTHER; note = Locked nucleic acid
  modified_base 14: mod_base = OTHER; note = 2'-O-methoxyethyl-guanosine
  modified_base 15: mod_base = OTHER; note = 2'-O-methoxyethyl-thymidine
  modified_base 16: mod_base = OTHER; note = 2'-O-methoxyethyl-guanosine
  modified_base 17: mod_base = OTHER; note = Locked nucleic acid
  modified_base 18: mod_base = OTHER; note = 2'-O-methoxyethyl-adenosine
tagaggctgtgatgtgaa

SEQ ID NO: 455 - RNA, 18 nt, synthetic construct
  source 1..18: mol_type = other RNA
  modified_base 1: mod_base = OTHER; note = 2'-O-methoxyethyl-thymidine
  modified_base 2: mod_base = OTHER; note = Locked nucleic acid
  modified_base 3: mod_base = OTHER; note = 2'-O-methoxyethyl-guanosine
  modified_base 4: mod_base = OTHER; note = 2'-O-methoxyethyl-adenosine
  modified_base 5: mod_base = OTHER; note = 2'-O-methoxyethyl-guanosine
  modified_base 6: mod_base = OTHER; note = Locked nucleic acid
  modified_base 7: mod_base = OTHER; note = 2'-O-methoxyethyl-5'-methylcytidine
  modified_base 8: mod_base = OTHER; note = 2'-O-methoxyethyl-thymidine
  modified_base 9: mod_base = OTHER; note = 2'-O-methoxyethyl-guanosine
  modified_base 10: mod_base = OTHER; note = 2'-O-methoxyethyl-thymidine
  modified_base 11: mod_base = OTHER; note = 2'-O-methoxyethyl-guanosine
  modified_base 12: mod_base = OTHER; note = 2'-O-methoxyethyl-adenosine
  modified_base 13: mod_base = OTHER; note = 2'-O-methoxyethyl-thymidine
  modified_base 14: mod_base = OTHER; note = Locked nucleic acid
  modified_base 15: mod_base = OTHER; note = 2'-O-methoxyethyl-thymidine
  modified_base 16: mod_base = OTHER; note = Locked nucleic acid
  modified_base 17: mod_base = OTHER; note = Locked nucleic acid
  modified_base 18: mod_base = OTHER; note = 2'-O-methoxyethyl-adenosine
tagaggctgtgatgtgaa

SEQ ID NO: 456 - RNA, 18 nt, synthetic construct
  source 1..18: mol_type = other RNA
  modified_base 1: mod_base = OTHER; note = 2'-O-methoxyethyl-guanosine
  modified_base 2: mod_base = OTHER; note = 2'-O-methoxyethyl-adenosine
  modified_base 3: mod_base = OTHER; note = 2'-O-methoxyethyl-thymidine
  modified_base 4: mod_base = OTHER; note = 2'-O-methoxyethyl-adenosine
  modified_base 5: mod_base = OTHER; note = 2'-O-methoxyethyl-guanosine
  modified_base 6: mod_base = OTHER; note = 2'-O-methoxyethyl-adenosine
  modified_base 7: mod_base = OTHER; note = 2'-O-methoxyethyl-guanosine
  modified_base 8: mod_base = OTHER; note = 2'-O-methoxyethyl-guanosine
  modified_base 9: mod_base = OTHER; note = 2'-O-methoxyethyl-5'-methylcytidine
  modified_base 10: mod_base = OTHER; note = 2'-O-methoxyethyl-thymidine
  modified_base 11: mod_base = OTHER; note = 2'-O-methoxyethyl-guanosine
  modified_base 12: mod_base = OTHER; note = 2'-O-methoxyethyl-thymidine
  modified_base 13: mod_base = OTHER; note = 2'-O-methoxyethyl-guanosine
  modified_base 14: mod_base = OTHER; note = 2'-O-methoxyethyl-adenosine
  modified_base 15: mod_base = OTHER; note = 2'-O-methoxyethyl-thymidine
  modified_base 16: mod_base = OTHER; note = 2'-O-methoxyethyl-thymidine
  modified_base 17: mod_base = OTHER; note = 2'-O-methoxyethyl-guanosine
  modified_base 18: mod_base = OTHER; note = 2'-O-methoxyethyl-guanosine
gatagaggctgtgattgg

SEQ ID NO: 457 - RNA, 18 nt, synthetic construct
  source 1..18: mol_type = other RNA
  modified_base 1: mod_base = OTHER; note = 2'-O-methoxyethyl-guanosine
  modified_base 2: mod_base = OTHER; note = Locked nucleic acid
  modified_base 3: mod_base = OTHER; note = 2'-O-methoxyethyl-thymidine
  modified_base 4: mod_base = OTHER; note = 2'-O-methoxyethyl-adenosine
  modified_base 5: mod_base = OTHER; note = 2'-O-methoxyethyl-guanosine
  modified_base 6: mod_base = OTHER; note = Locked nucleic acid
  modified_base 7: mod_base = OTHER; note = 2'-O-methoxyethyl-guanosine
  modified_base 8: mod_base = OTHER; note = 2'-O-methoxyethyl-guanosine
  modified_base 9: mod_base = OTHER; note = 2'-O-methoxyethyl-5'-methylcytidine
  modified_base 10: mod_base = OTHER; note = 2'-O-methoxyethyl-thymidine
  modified_base 11: mod_base = OTHER; note = 2'-O-methoxyethyl-guanosine
  modified_base 12: mod_base = OTHER; note = 2'-O-methoxyethyl-thymidine
  modified_base 13: mod_base = OTHER; note = Locked nucleic acid
  modified_base 14: mod_base = OTHER; note = 2'-O-methoxyethyl-adenosine
  modified_base 15: mod_base = OTHER; note = 2'-O-methoxyethyl-thymidine
  modified_base 16: mod_base = OTHER; note = 2'-O-methoxyethyl-thymidine
  modified_base 17: mod_base = OTHER; note = Locked nucleic acid
  modified_base 18: mod_base = OTHER; note = 2'-O-methoxyethyl-guanosine
gatagaggctgtgattgg

SEQ ID NO: 458 - RNA, 18 nt, synthetic construct
  source 1..18: mol_type = other RNA
  modified_base 1: mod_base = OTHER; note = 2'-O-methoxyethyl-guanosine
  modified_base 2: mod_base = OTHER; note = Locked nucleic acid
  modified_base 3: mod_base = OTHER; note = 2'-O-methoxyethyl-thymidine
  modified_base 4: mod_base = OTHER; note = 2'-O-methoxyethyl-adenosine
  modified_base 5: mod_base = OTHER; note = 2'-O-methoxyethyl-guanosine
  modified_base 6: mod_base = OTHER; note = Locked nucleic acid
  modified_base 7: mod_base = OTHER; note = 2'-O-methoxyethyl-guanosine
  modified_base 8: mod_base = OTHER; note = 2'-O-methoxyethyl-guanosine
  modified_base 9: mod_base = OTHER; note = 2'-O-methoxyethyl-5'-methylcytidine
  modified_base 10: mod_base = OTHER; note = 2'-O-methoxyethyl-thymidine
  modified_base 11: mod_base = OTHER; note = 2'-O-methoxyethyl-guanosine
  modified_base 12: mod_base = OTHER; note = 2'-O-methoxyethyl-thymidine
  modified_base 13: mod_base = OTHER; note = Locked nucleic acid
  modified_base 14: mod_base = OTHER; note = 2'-O-methoxyethyl-adenosine
  modified_base 15: mod_base = OTHER; note = Locked nucleic acid
  modified_base 16: mod_base = OTHER; note = 2'-O-methoxyethyl-thymidine
  modified_base 17: mod_base = OTHER; note = Locked nucleic acid
  modified_base 18: mod_base = OTHER; note = 2'-O-methoxyethyl-guanosine
gatagaggctgtgattgg

SEQ ID NO: 459 - RNA, 18 nt, synthetic construct
  source 1..18: mol_type = other RNA
  modified_base 1: mod_base = OTHER; note = 2'-O-methoxyethyl-adenosine
  modified_base 2: mod_base = OTHER; note = Locked nucleic acid
  modified_base 3: mod_base = OTHER; note = 2'-O-methoxyethyl-adenosine
  modified_base 4: mod_base = OTHER; note = 2'-O-methoxyethyl-thymidine
  modified_base 5: mod_base = OTHER; note = 2'-O-methoxyethyl-adenosine
  modified_base 6: mod_base = OTHER; note = Locked nucleic acid
  modified_base 7: mod_base = OTHER; note = 2'-O-methoxyethyl-adenosine
  modified_base 8: mod_base = OTHER; note = 2'-O-methoxyethyl-guanosine
  modified_base 9: mod_base = OTHER; note = 2'-O-methoxyethyl-guanosine
  modified_base 10: mod_base = OTHER; note = 2'-O-methoxyethyl-5'-methylcytidine
  modified_base 11: mod_base = OTHER; note = 2'-O-methoxyethyl-thymidine
  modified_base 12: mod_base = OTHER; note = 2'-O-methoxyethyl-guanosine
  modified_base 13: mod_base = OTHER; note = Locked nucleic acid
  modified_base 14: mod_base = OTHER; note = 2'-O-methoxyethyl-guanosine
  modified_base 15: mod_base = OTHER; note = 2'-O-methoxyethyl-adenosine
  modified_base 16: mod_base = OTHER; note = 2'-O-methoxyethyl-thymidine
  modified_base 17: mod_base = OTHER; note = Locked nucleic acid
  modified_base 18: mod_base = OTHER; note = 2'-O-methoxyethyl-guanosine
agatagaggctgtgatgg

SEQ ID NO: 460 - RNA, 16 nt, synthetic construct
  source 1..16: mol_type = other RNA
  modified_base 1: mod_base = OTHER; note = 2'-O-methoxyethyl-guanosine
  modified_base 2: mod_base = OTHER; note = 2'-O-methoxyethyl-guanosine
  modified_base 3: mod_base = OTHER; note = 2'-O-methoxyethyl-5'-methylcytidine
  modified_base 4: mod_base = OTHER; note = 2'-O-methoxyethyl-thymidine
  modified_base 5: mod_base = OTHER; note = 2'-O-methoxyethyl-guanosine
  modified_base 6: mod_base = OTHER; note = 2'-O-methoxyethyl-thymidine
  modified_base 7: mod_base = OTHER; note = 2'-O-methoxyethyl-guanosine
  modified_base 8: mod_base = OTHER; note = 2'-O-methoxyethyl-adenosine
  modified_base 9: mod_base = OTHER; note = 2'-O-methoxyethyl-thymidine
  modified_base 10: mod_base = OTHER; note = 2'-O-methoxyethyl-guanosine
  modified_base 11: mod_base = OTHER; note = 2'-O-methoxyethyl-thymidine
  modified_base 12: mod_base = OTHER; note = 2'-O-methoxyethyl-guanosine
  modified_base 13: mod_base = OTHER; note = 2'-O-methoxyethyl-adenosine
  modified_base 14: mod_base = OTHER; note = 2'-O-methoxyethyl-adenosine
  modified_base 15: mod_base = OTHER; note = 2'-O-methoxyethyl-thymidine
  modified_base 16: mod_base = OTHER; note = 2'-O-methoxyethyl-adenosine
ggctgtgatgtgaata

SEQ ID NO: 461 - RNA, 16 nt, synthetic construct
  source 1..16: mol_type = other RNA
  modified_base 1: mod_base = OTHER; note = 2'-O-methoxyethyl-guanosine
  modified_base 2: mod_base = OTHER; note = Locked nucleic acid
  modified_base 3: mod_base = OTHER; note = 2'-O-methoxyethyl-5'-methylcytidine
  modified_base 4: mod_base = OTHER; note = 2'-O-methoxyethyl-thymidine
  modified_base 5: mod_base = OTHER; note = 2'-O-methoxyethyl-guanosine
  modified_base 6: mod_base = OTHER; note = Locked nucleic acid
  modified_base 7: mod_base = OTHER; note = 2'-O-methoxyethyl-guanosine
  modified_base 8: mod_base = OTHER; note = 2'-O-methoxyethyl-adenosine
  modified_base 9: mod_base = OTHER; note = 2'-O-methoxyethyl-thymidine
  modified_base 10: mod_base = OTHER; note = Locked nucleic acid
  modified_base 11: mod_base = OTHER; note = 2'-O-methoxyethyl-thymidine
  modified_base 12: mod_base = OTHER; note = 2'-O-methoxyethyl-guanosine
  modified_base 13: mod_base = OTHER; note = 2'-O-methoxyethyl-adenosine
  modified_base 14: mod_base = OTHER; note = 2'-O-methoxyethyl-adenosine
  modified_base 15: mod_base = OTHER; note = Locked nucleic acid
  modified_base 16: mod_base = OTHER; note = 2'-O-methoxyethyl-adenosine
ggctgtgatgtgaata

SEQ ID NO: 462 - RNA, 16 nt, synthetic construct
  source 1..16: mol_type = other RNA
  modified_base 1: mod_base = OTHER; note = 2'-O-methoxyethyl-guanosine
  modified_base 2: mod_base = OTHER; note = Locked nucleic acid
  modified_base 3: mod_base = OTHER; note = 2'-O-methoxyethyl-5'-methylcytidine
  modified_base 4: mod_base = OTHER; note = 2'-O-methoxyethyl-thymidine
  modified_base 5: mod_base = OTHER; note = 2'-O-methoxyethyl-guanosine
  modified_base 6: mod_base = OTHER; note = Locked nucleic acid
  modified_base 7: mod_base = OTHER; note = 2'-O-methoxyethyl-guanosine
  modified_base 8: mod_base = OTHER; note = 2'-O-methoxyethyl-adenosine
  modified_base 9: mod_base = OTHER; note = 2'-O-methoxyethyl-thymidine
  modified_base 10: mod_base = OTHER; note = Locked nucleic acid
  modified_base 11: mod_base = OTHER; note = 2'-O-methoxyethyl-thymidine
  modified_base 12: mod_base = OTHER; note = Locked nucleic acid
  modified_base 13: mod_base = OTHER; note = 2'-O-methoxyethyl-adenosine
  modified_base 14: mod_base = OTHER; note = 2'-O-methoxyethyl-adenosine
  modified_base 15: mod_base = OTHER; note = 2'-O-methoxyethyl-thymidine
  modified_base 16: mod_base = OTHER; note = 2'-O-methoxyethyl-adenosine
ggctgtgatgtgaata

SEQ ID NO: 463 - RNA, 16 nt, synthetic construct
  source 1..16: mol_type = other RNA
  modified_base 1: mod_base = OTHER; note = 2'-O-methoxyethyl-guanosine
  modified_base 2: mod_base = OTHER; note = 2'-O-methoxyethyl-adenosine
  modified_base 3: mod_base = OTHER; note = 2'-O-methoxyethyl-guanosine
  modified_base 4: mod_base = OTHER; note = 2'-O-methoxyethyl-guanosine
  modified_base 5: mod_base = OTHER; note = 2'-O-methoxyethyl-5'-methylcytidine
  modified_base 6: mod_base = OTHER; note = 2'-O-methoxyethyl-thymidine
  modified_base 7: mod_base = OTHER; note = 2'-O-methoxyethyl-guanosine
  modified_base 8: mod_base = OTHER; note = 2'-O-methoxyethyl-thymidine
  modified_base 9: mod_base = OTHER; note = 2'-O-methoxyethyl-guanosine
  modified_base 10: mod_base = OTHER; note = 2'-O-methoxyethyl-adenosine
  modified_base 11: mod_base = OTHER; note = 2'-O-methoxyethyl-thymidine
  modified_base 12: mod_base = OTHER; note = 2'-O-methoxyethyl-guanosine
  modified_base 13: mod_base = OTHER; note = 2'-O-methoxyethyl-thymidine
  modified_base 14: mod_base = OTHER; note = 2'-O-methoxyethyl-guanosine
  modified_base 15: mod_base = OTHER; note = 2'-O-methoxyethyl-adenosine
  modified_base 16: mod_base = OTHER; note = 2'-O-methoxyethyl-adenosine
gaggctgtgatgtgaa

SEQ ID NO: 464 - RNA, 16 nt, synthetic construct
  source 1..16: mol_type = other RNA
  modified_base 1: mod_base = OTHER; note = 2'-O-methoxyethyl-guanosine
  modified_base 2: mod_base = OTHER; note = Locked nucleic acid
  modified_base 3: mod_base = OTHER; note = 2'-O-methoxyethyl-guanosine
  modified_base 4: mod_base = OTHER; note = 2'-O-methoxyethyl-guanosine
  modified_base 5: mod_base = OTHER; note = 2'-O-methoxyethyl-5'-methylcytidine
  modified_base 6: mod_base = OTHER; note = Locked nucleic acid
  modified_base 7: mod_base = OTHER; note = 2'-O-methoxyethyl-guanosine
  modified_base 8: mod_base = OTHER; note = 2'-O-methoxyethyl-thymidine
  modified_base 9: mod_base = OTHER; note = 2'-O-methoxyethyl-guanosine
  modified_base 10: mod_base = OTHER; note = 2'-O-methoxyethyl-adenosine
  modified_base 11: mod_base = OTHER; note = Locked nucleic acid
  modified_base 12: mod_base = OTHER; note = 2'-O-methoxyethyl-guanosine
  modified_base 13: mod_base = OTHER; note = 2'-O-methoxyethyl-thymidine
  modified_base 14: mod_base = OTHER; note = 2'-O-methoxyethyl-guanosine
  modified_base 15: mod_base = OTHER; note = Locked nucleic acid
  modified_base 16: mod_base = OTHER; note = 2'-O-methoxyethyl-adenosine
gaggctgtgatgtgaa

SEQ ID NO: 465 - RNA, 16 nt, synthetic construct
  source 1..16: mol_type = other RNA
  modified_base 1: mod_base = OTHER; note = 2'-O-methoxyethyl-guanosine
  modified_base 2: mod_base = OTHER; note = Locked nucleic acid
  modified_base 3: mod_base = OTHER; note = 2'-O-methoxyethyl-guanosine
  modified_base 4: mod_base = OTHER; note = 2'-O-methoxyethyl-guanosine
  modified_base 5: mod_base = OTHER; note = 2'-O-methoxyethyl-5'-methylcytidine
  modified_base 6: mod_base = OTHER; note = Locked nucleic acid
  modified_base 7: mod_base = OTHER; note = 2'-O-methoxyethyl-guanosine
  modified_base 8: mod_base = OTHER; note = 2'-O-methoxyethyl-thymidine
  modified_base 9: mod_base = OTHER; note = 2'-O-methoxyethyl-guanosine
  modified_base 10: mod_base = OTHER; note = 2'-O-methoxyethyl-adenosine
  modified_base 11: mod_base = OTHER; note = 2'-O-methoxyethyl-thymidine
  modified_base 12: mod_base = OTHER; note = Locked nucleic acid
  modified_base 13: mod_base = OTHER; note = 2'-O-methoxyethyl-thymidine
  modified_base 14: mod_base = OTHER; note = Locked nucleic acid
  modified_base 15: mod_base = OTHER; note = Locked nucleic acid
  modified_base 16: mod_base = OTHER; note = 2'-O-methoxyethyl-adenosine
gaggctgtgatgtgaa

SEQ ID NO: 466 - RNA, 16 nt, synthetic construct
  source 1..16: mol_type = other RNA
  modified_base 1: mod_base = OTHER; note = 2'-O-methoxyethyl-thymidine
  modified_base 2: mod_base = OTHER; note = 2'-O-methoxyethyl-adenosine
  modified_base 3: mod_base = OTHER; note = 2'-O-methoxyethyl-guanosine
  modified_base 4: mod_base = OTHER; note = 2'-O-methoxyethyl-adenosine
  modified_base 5: mod_base = OTHER; note = 2'-O-methoxyethyl-guanosine
  modified_base 6: mod_base = OTHER; note = 2'-O-methoxyethyl-guanosine
  modified_base 7: mod_base = OTHER; note = 2'-O-methoxyethyl-5'-methylcytidine
  modified_base 8: mod_base = OTHER; note = 2'-O-methoxyethyl-thymidine
  modified_base 9: mod_base = OTHER; note = 2'-O-methoxyethyl-guanosine
  modified_base 10: mod_base = OTHER; note = 2'-O-methoxyethyl-thymidine
  modified_base 11: mod_base = OTHER; note = 2'-O-methoxyethyl-guanosine
  modified_base 12: mod_base = OTHER; note = 2'-O-methoxyethyl-adenosine
  modified_base 13: mod_base = OTHER; note = 2'-O-methoxyethyl-thymidine
  modified_base 14: mod_base = OTHER; note = 2'-O-methoxyethyl-thymidine
  modified_base 15: mod_base = OTHER; note = 2'-O-methoxyethyl-guanosine
  modified_base 16: mod_base = OTHER; note = 2'-O-methoxyethyl-guanosine
tagaggctgtgattgg

SEQ ID NO: 467 - RNA, 16 nt, synthetic construct
  source 1..16: mol_type = other RNA
  modified_base 1: mod_base = OTHER; note = 2'-O-methoxyethyl-thymidine
  modified_base 2: mod_base = OTHER; note = Locked nucleic acid
  modified_base 3: mod_base = OTHER; note = 2'-O-methoxyethyl-guanosine
  modified_base 4: mod_base = OTHER; note = 2'-O-methoxyethyl-adenosine
  modified_base 5: mod_base = OTHER; note = 2'-O-methoxyethyl-guanosine
  modified_base 6: mod_base = OTHER; note = Locked nucleic acid
  modified_base 7: mod_base = OTHER; note = 2'-O-methoxyethyl-5'-methylcytidine
  modified_base 8: mod_base = OTHER; note = 2'-O-methoxyethyl-thymidine
  modified_base 9: mod_base = OTHER; note = 2'-O-methoxyethyl-guanosine
  modified_base 10: mod_base = OTHER; note = 2'-O-methoxyethyl-thymidine
  modified_base 11: mod_base = OTHER; note = Locked nucleic acid
  modified_base 12: mod_base = OTHER; note = 2'-O-methoxyethyl-adenosine
  modified_base 13: mod_base = OTHER; note = 2'-O-methoxyethyl-thymidine
  modified_base 14: mod_base = OTHER; note = 2'-O-methoxyethyl-thymidine
  modified_base 15: mod_base = OTHER; note = Locked nucleic acid
  modified_base 16: mod_base = OTHER; note = 2'-O-methoxyethyl-guanosine
tagaggctgtgattgg

SEQ ID NO: 468 - RNA, 16 nt, synthetic construct
  source 1..16: mol_type = other RNA
  modified_base 1: mod_base = OTHER; note = 2'-O-methoxyethyl-thymidine
  modified_base 2: mod_base = OTHER; note = Locked nucleic acid
  modified_base 3: mod_base = OTHER; note = 2'-O-methoxyethyl-guanosine
  modified_base 4: mod_base = OTHER; note = 2'-O-methoxyethyl-adenosine
  modified_base 5: mod_base = OTHER; note = 2'-O-methoxyethyl-guanosine
  modified_base 6: mod_base = OTHER; note = Locked nucleic acid
  modified_base 7: mod_base = OTHER; note = 2'-O-methoxyethyl-5'-methylcytidine
  modified_base 8: mod_base = OTHER; note = 2'-O-methoxyethyl-thymidine
  modified_base 9: mod_base = OTHER; note = 2'-O-methoxyethyl-guanosine
  modified_base 10: mod_base = OTHER; note = 2'-O-methoxyethyl-thymidine
  modified_base 11: mod_base = OTHER; note = Locked nucleic acid
  modified_base 12: mod_base = OTHER; note = 2'-O-methoxyethyl-adenosine
  modified_base 13: mod_base = OTHER; note = Locked nucleic acid
  modified_base 14: mod_base = OTHER; note = 2'-O-methoxyethyl-thymidine
  modified_base 15: mod_base = OTHER; note = Locked nucleic acid
  modified_base 16: mod_base = OTHER; note = 2'-O-methoxyethyl-guanosine
tagaggctgtgattgg

SEQ ID NO: 469 - RNA, 16 nt, synthetic construct
  source 1..16: mol_type = other RNA
  modified_base 1: mod_base = OTHER; note = 2'-O-methoxyethyl-adenosine
  modified_base 2: mod_base = OTHER; note = Locked nucleic acid
  modified_base 3: mod_base = OTHER; note = 2'-O-methoxyethyl-adenosine
  modified_base 4: mod_base = OTHER; note = 2'-O-methoxyethyl-guanosine
  modified_base 5: mod_base = OTHER; note = 2'-O-methoxyethyl-adenosine
  modified_base 6: mod_base = OTHER; note = Locked nucleic acid
  modified_base 7: mod_base = OTHER; note = 2'-O-methoxyethyl-guanosine
  modified_base 8: mod_base = OTHER; note = 2'-O-methoxyethyl-5'-methylcytidine
  modified_base 9: mod_base = OTHER; note = 2'-O-methoxyethyl-thymidine
  modified_base 10: mod_base = OTHER; note = 2'-O-methoxyethyl-guanosine
  modified_base 11: mod_base = OTHER; note = Locked nucleic acid
  modified_base 12: mod_base = OTHER; note = 2'-O-methoxyethyl-guanosine
  modified_base 13: mod_base = OTHER; note = 2'-O-methoxyethyl-adenosine
  modified_base 14: mod_base = OTHER; note = 2'-O-methoxyethyl-thymidine
  modified_base 15: mod_base = OTHER; note = Locked nucleic acid
  modified_base 16: mod_base = OTHER; note = 2'-O-methoxyethyl-guanosine
atagaggctgtgatgg

SEQ ID NO: 470 - RNA, 16 nt, synthetic construct
  source 1..16: mol_type = other RNA
  modified_base 1: mod_base = OTHER; note = 2'-O-methoxyethyl-guanosine
  modified_base 2: mod_base = OTHER; note = Locked nucleic acid
  modified_base 3: mod_base = OTHER; note = 2'-O-methoxyethyl-thymidine
  modified_base 4: mod_base = OTHER; note = 2'-O-methoxyethyl-adenosine
  modified_base 5: mod_base = OTHER; note = 2'-O-methoxyethyl-guanosine
  modified_base 6: mod_base = OTHER; note = Locked nucleic acid
  modified_base 7: mod_base = OTHER; note = 2'-O-methoxyethyl-guanosine
  modified_base 8: mod_base = OTHER; note = 2'-O-methoxyethyl-guanosine
  modified_base 9: mod_base = OTHER; note = 2'-O-methoxyethyl-5'-methylcytidine
  modified_base 10: mod_base = OTHER; note = 2'-O-methoxyethyl-thymidine
  modified_base 11: mod_base = OTHER; note = Locked nucleic acid
  modified_base 12: mod_base = OTHER; note = 2'-O-methoxyethyl-thymidine
  modified_base 13: mod_base = OTHER; note = 2'-O-methoxyethyl-guanosine
  modified_base 14: mod_base = OTHER; note = 2'-O-methoxyethyl-adenosine
  modified_base 15: mod_base = OTHER; note = 2'-O-methoxyethyl-thymidine
  modified_base 16: mod_base = OTHER; note = 2'-O-methoxyethyl-guanosine
gatagaggctgtgatg

SEQ ID NO: 471 - RNA, 16 nt, synthetic construct
  source 1..16: mol_type = other RNA
  modified_base 1: mod_base = OTHER; note = 2'-O-methoxyethyl-adenosine
  modified_base 2: mod_base = OTHER; note = Locked nucleic acid
  modified_base 3: mod_base = OTHER; note = 2'-O-methoxyethyl-adenosine
  modified_base 4: mod_base = OTHER; note = 2'-O-methoxyethyl-thymidine
  modified_base 5: mod_base = OTHER; note = 2'-O-methoxyethyl-adenosine
  modified_base 6: mod_base = OTHER; note = Locked nucleic acid
  modified_base 7: mod_base = OTHER; note = 2'-O-methoxyethyl-adenosine
  modified_base 8: mod_base = OTHER; note = 2'-O-methoxyethyl-guanosine
  modified_base 9: mod_base = OTHER; note = 2'-O-methoxyethyl-guanosine
  modified_base 10: mod_base = OTHER; note = 2'-O-methoxyethyl-5'-methylcytidine
  modified_base 11: mod_base = OTHER; note = Locked nucleic acid
  modified_base 12: mod_base = OTHER; note = 2'-O-methoxyethyl-guanosine
  modified_base 13: mod_base = OTHER; note = 2'-O-methoxyethyl-thymidine
  modified_base 14: mod_base = OTHER; note = 2'-O-methoxyethyl-guanosine
  modified_base 15: mod_base = OTHER; note = Locked nucleic acid
  modified_base 16: mod_base = OTHER; note = 2'-O-methoxyethyl-thymidine
agatagaggctgtgat

SEQ ID NO: 472 - RNA, 20 nt, synthetic construct
  source 1..20: mol_type = other RNA
  modified_base 1: mod_base = OTHER; note = 2'-O-methoxyethyl-guanosine
  modified_base 2: mod_base = OTHER; note = Locked nucleic acid
  modified_base 3: mod_base = OTHER; note = 2'-O-methoxyethyl-5'-methylcytidine
  modified_base 4: mod_base = OTHER; note = 2'-O-methoxyethyl-thymidine
  modified_base 5: mod_base = OTHER; note = 2'-O-methoxyethyl-adenosine
  modified_base 6: mod_base = OTHER; note = Locked nucleic acid
  modified_base 7: mod_base = OTHER; note = 2'-O-methoxyethyl-guanosine
  modified_base 8: mod_base = OTHER; note = 2'-O-methoxyethyl-adenosine
  modified_base 9: mod_base = OTHER; note = 2'-O-methoxyethyl-adenosine
  modified_base 10: mod_base = OTHER; note = 2'-O-methoxyethyl-adenosine
  modified_base 11: mod_base = OTHER; note = 2'-O-methoxyethyl-5'-methylcytidine
  modified_base 12: mod_base = OTHER; note = 2'-O-methoxyethyl-thymidine
  modified_base 13: mod_base = OTHER; note = 2'-O-methoxyethyl-guanosine
  modified_base 14: mod_base = OTHER; note = 2'-O-methoxyethyl-adenosine
  modified_base 15: mod_base = OTHER; note = Locked nucleic acid
  modified_base 16: mod_base = OTHER; note = 2'-O-methoxyethyl-guanosine
  modified_base 17: mod_base = OTHER; note = 2'-O-methoxyethyl-guanosine
  modified_base 18: mod_base = OTHER; note = 2'-O-methoxyethyl-adenosine
  modified_base 19: mod_base = OTHER; note = Locked nucleic acid
  modified_base 20: mod_base = OTHER; note = 2'-O-methoxyethyl-adenosine
ggctatgaaactgatggaga

SEQ ID NO: 473 - RNA, 18 nt, synthetic construct
  source 1..18: mol_type = other RNA
  modified_base 1: mod_base = OTHER; note = 2'-O-methoxyethyl-5'-methylcytidine
  modified_base 2: mod_base = OTHER; note = Locked nucleic acid
  modified_base 3: mod_base = OTHER; note = 2'-O-methoxyethyl-adenosine
  modified_base 4: mod_base = OTHER; note = 2'-O-methoxyethyl-thymidine
  modified_base 5: mod_base = OTHER; note = 2'-O-methoxyethyl-guanosine
  modified_base 6: mod_base = OTHER; note = Locked nucleic acid
  modified_base 7: mod_base = OTHER; note = 2'-O-methoxyethyl-adenosine
  modified_base 8: mod_base = OTHER; note = 2'-O-methoxyethyl-adenosine
  modified_base 9: mod_base = OTHER; note = 2'-O-methoxyethyl-5'-methylcytidine
  modified_base 10: mod_base = OTHER; note = 2'-O-methoxyethyl-thymidine
  modified_base 11: mod_base = OTHER; note = 2'-O-methoxyethyl-guanosine
  modified_base 12: mod_base = OTHER; note = 2'-O-methoxyethyl-adenosine
  modified_base 13: mod_base = OTHER; note = Locked nucleic acid
  modified_base 14: mod_base = OTHER; note = 2'-O-methoxyethyl-guanosine
  modified_base 15: mod_base = OTHER; note = 2'-O-methoxyethyl-guanosine
  modified_base 16: mod_base = OTHER; note = 2'-O-methoxyethyl-adenosine
  modified_base 17: mod_base = OTHER; note = Locked nucleic acid
  modified_base 18: mod_base = OTHER; note = 2'-O-methoxyethyl-adenosine
ctatgaaactgatggaga

SEQ ID NO: 474 - RNA, 18 nt, synthetic construct
  source 1..18: mol_type = other RNA
  modified_base 1: mod_base = OTHER; note = 2'-O-methoxyethyl-guanosine
  modified_base 2: mod_base = OTHER; note = 5'-methylcytidine locked nucleic acid
  modified_base 3: mod_base = OTHER; note = 2'-O-methoxyethyl-thymidine
  modified_base 4: mod_base = OTHER; note = 2'-O-methoxyethyl-adenosine
  modified_base 5: mod_base = OTHER; note = 2'-O-methoxyethyl-thymidine
  modified_base 6: mod_base = OTHER; note = Locked nucleic acid
  modified_base 7: mod_base = OTHER; note = 2'-O-methoxyethyl-adenosine
  modified_base 8: mod_base = OTHER; note = 2'-O-methoxyethyl-adenosine
  modified_base 9: mod_base = OTHER; note = 2'-O-methoxyethyl-adenosine
  modified_base 10: mod_base = OTHER; note = 2'-O-methoxyethyl-5'-methylcytidine
  modified_base 11: mod_base = OTHER; note = 2'-O-methoxyethyl-thymidine
  modified_base 12: mod_base = OTHER; note = 2'-O-methoxyethyl-guanosine
  modified_base 13: mod_base = OTHER; note = Locked nucleic acid
  modified_base 14: mod_base = OTHER; note = 2'-O-methoxyethyl-thymidine
  modified_base 15: mod_base = OTHER; note = 2'-O-methoxyethyl-guanosine
  modified_base 16: mod_base = OTHER; note = 2'-O-methoxyethyl-guanosine
  modified_base 17: mod_base = OTHER; note = Locked nucleic acid
  modified_base 18: mod_base = OTHER; note = 2'-O-methoxyethyl-guanosine
gctatgaaactgatggag

SEQ ID NO: 475 - RNA, 18 nt, synthetic construct
  source 1..18: mol_type = other RNA
  modified_base 1: mod_base = OTHER; note = 2'-O-methoxyethyl-guanosine
  modified_base 2: mod_base = OTHER; note = Locked nucleic acid
  modified_base 3: mod_base = OTHER; note = 2'-O-methoxyethyl-5'-methylcytidine
  modified_base 4: mod_base = OTHER; note = 2'-O-methoxyethyl-thymidine
  modified_base 5: mod_base = OTHER; note = 2'-O-methoxyethyl-adenosine
  modified_base 6: mod_base = OTHER; note = Locked nucleic acid
  modified_base 7: mod_base = OTHER; note = 2'-O-methoxyethyl-guanosine
  modified_base 8: mod_base = OTHER; note = 2'-O-methoxyethyl-adenosine
  modified_base 9: mod_base = OTHER; note = 2'-O-methoxyethyl-adenosine
  modified_base 10: mod_base = OTHER; note = 2'-O-methoxyethyl-adenosine
  modified_base 11: mod_base = OTHER; note = 2'-O-methoxyethyl-5'-methylcytidine
  modified_base 12: mod_base = OTHER; note = 2'-O-methoxyethyl-thymidine
  modified_base 13: mod_base = OTHER; note = Locked nucleic acid
  modified_base 14: mod_base = OTHER; note = 2'-O-methoxyethyl-adenosine
  modified_base 15: mod_base = OTHER; note = 2'-O-methoxyethyl-thymidine
  modified_base 16: mod_base = OTHER; note = 2'-O-methoxyethyl-guanosine
  modified_base 17: mod_base = OTHER; note = Locked nucleic acid
  modified_base 18: mod_base = OTHER; note = 2'-O-methoxyethyl-adenosine
ggctatgaaactgatgga

SEQ ID NO: 476 - RNA, 16 nt, synthetic construct
  source 1..16: mol_type = other RNA
  modified_base 1: mod_base = OTHER; note = 2'-O-methoxyethyl-adenosine
  modified_base 2: mod_base = OTHER; note = Locked nucleic acid
  modified_base 3: mod_base = OTHER; note = 2'-O-methoxyethyl-guanosine
  modified_base 4: mod_base = OTHER; note = 2'-O-methoxyethyl-adenosine
  modified_base 5: mod_base = OTHER; note = Locked nucleic acid
  modified_base 6: mod_base = OTHER; note = 2'-O-methoxyethyl-adenosine
  modified_base 7: mod_base = OTHER; note = 2'-O-methoxyethyl-5'-methylcytidine
  modified_base 8: mod_base = OTHER; note = 2'-O-methoxyethyl-thymidine
  modified_base 9: mod_base = OTHER; note = 2'-O-methoxyethyl-guanosine
  modified_base 10: mod_base = OTHER; note = 2'-O-methoxyethyl-adenosine
  modified_base 11: mod_base = OTHER; note = 2'-O-methoxyethyl-thymidine
  modified_base 12: mod_base = OTHER; note = Locked nucleic acid
  modified_base 13: mod_base = OTHER; note = 2'-O-methoxyethyl-guanosine
  modified_base 14: mod_base = OTHER; note = 2'-O-methoxyethyl-adenosine
  modified_base 15: mod_base = OTHER; note = Locked nucleic acid
  modified_base 16: mod_base = OTHER; note = 2'-O-methoxyethyl-adenosine
atgaaactgatggaga

SEQ ID NO: 477 - RNA, 16 nt, synthetic construct
  source 1..16: mol_type = other RNA
  modified_base 1: mod_base = OTHER; note = 2'-O-methoxyethyl-adenosine
  modified_base 2: mod_base = OTHER; note = Locked nucleic acid
  modified_base 3: mod_base = OTHER; note = 2'-O-methoxyethyl-guanosine
  modified_base 4: mod_base = OTHER; note = 2'-O-methoxyethyl-adenosine
  modified_base 5: mod_base = OTHER; note = Locked nucleic acid
  modified_base 6: mod_base = OTHER; note = 2'-O-methoxyethyl-adenosine
  modified_base 7: mod_base = OTHER; note = 2'-O-methoxyethyl-5'-methylcytidine
  modified_base 8: mod_base = OTHER; note = Locked nucleic acid
  modified_base 9: mod_base = OTHER; note = Locked nucleic acid
  modified_base 10: mod_base = OTHER; note = 2'-O-methoxyethyl-adenosine
  modified_base 11: mod_base = OTHER; note = 2'-O-methoxyethyl-thymidine
  modified_base 12: mod_base = OTHER; note = Locked nucleic acid
  modified_base 13: mod_base = OTHER; note = 2'-O-methoxyethyl-guanosine
  modified_base 14: mod_base = OTHER; note = 2'-O-methoxyethyl-adenosine
  modified_base 15: mod_base = OTHER; note = Locked nucleic acid
  modified_base 16: mod_base = OTHER; note = 2'-O-methoxyethyl-adenosine
atgaaactgatggaga

SEQ ID NO: 478 - RNA, 16 nt, synthetic construct
  source 1..16: mol_type = other RNA
  modified_base 1: mod_base = OTHER; note = 2'-O-methoxyethyl-5'-methylcytidine
  modified_base 2: mod_base = OTHER; note = Locked nucleic acid
  modified_base 3: mod_base = OTHER; note = 2'-O-methoxyethyl-adenosine
  modified_base 4: mod_base = OTHER; note = 2'-O-methoxyethyl-thymidine
  modified_base 5: mod_base = OTHER; note = Locked nucleic acid
  modified_base 6: mod_base = OTHER; note = 2'-O-methoxyethyl-adenosine
  modified_base 7: mod_base = OTHER; note = 2'-O-methoxyethyl-adenosine
  modified_base 8: mod_base = OTHER; note = 2'-O-methoxyethyl-adenosine
  modified_base 9: mod_base = OTHER; note = 2'-O-methoxyethyl-5'-methylcytidine
  modified_base 10: mod_base = OTHER; note = 2'-O-methoxyethyl-thymidine
  modified_base 11: mod_base = OTHER; note = 2'-O-methoxyethyl-guanosine
  modified_base 12: mod_base = OTHER; note = Locked nucleic acid
  modified_base 13: mod_base = OTHER; note = 2'-O-methoxyethyl-thymidine
  modified_base 14: mod_base = OTHER; note = 2'-O-methoxyethyl-guanosine
  modified_base 15: mod_base = OTHER; note = Locked nucleic acid
  modified_base 16: mod_base = OTHER; note = 2'-O-methoxyethyl-adenosine
ctatgaaactgatgga

SEQ ID NO: 479 - RNA, 16 nt, synthetic construct
  source 1..16: mol_type = other RNA
  modified_base 1: mod_base = OTHER; note = 2'-O-methoxyethyl-5'-methylcytidine
  modified_base 2: mod_base = OTHER; note = Locked nucleic acid
  modified_base 3: mod_base = OTHER; note = 2'-O-methoxyethyl-adenosine
  modified_base 4: mod_base = OTHER; note = 2'-O-methoxyethyl-thymidine
  modified_base 5: mod_base = OTHER; note = Locked nucleic acid
  modified_base 6: mod_base = OTHER; note = 2'-O-methoxyethyl-adenosine
  modified_base 7: mod_base = OTHER; note = 2'-O-methoxyethyl-adenosine
  modified_base 8: mod_base = OTHER; note = Locked nucleic acid
  modified_base 9: mod_base = OTHER; note = 5'-methylcytidine locked nucleic acid
  modified_base 10: mod_base = OTHER; note = 2'-O-methoxyethyl-thymidine
  modified_base 11: mod_base = OTHER; note = 2'-O-methoxyethyl-guanosine
  modified_base 12: mod_base = OTHER; note = Locked nucleic acid
  modified_base 13: mod_base = OTHER; note = 2'-O-methoxyethyl-thymidine
  modified_base 14: mod_base = OTHER; note = 2'-O-methoxyethyl-guanosine
  modified_base 15: mod_base = OTHER; note = Locked nucleic acid
  modified_base 16: mod_base = OTHER; note = 2'-O-methoxyethyl-adenosine
ctatgaaactgatgga

SEQ ID NO: 480 - RNA, 16 nt, synthetic construct
  source 1..16: mol_type = other RNA
  modified_base 1: mod_base = OTHER; note = 2'-O-methoxyethyl-guanosine
  modified_base 2: mod_base = OTHER; note = Locked nucleic acid
  modified_base 3: mod_base = OTHER; note = 2'-O-methoxyethyl-5'-methylcytidine
  modified_base 4: mod_base = OTHER; note = 2'-O-methoxyethyl-thymidine
  modified_base 5: mod_base = OTHER; note = Locked nucleic acid
  modified_base 6: mod_base = OTHER; note = 2'-O-methoxyethyl-thymidine
  modified_base 7: mod_base = OTHER; note = 2'-O-methoxyethyl-guanosine
  modified_base 8: mod_base = OTHER; note = 2'-O-methoxyethyl-adenosine
  modified_base 9: mod_base = OTHER; note = 2'-O-methoxyethyl-adenosine
  modified_base 10: mod_base = OTHER; note = 2'-O-methoxyethyl-adenosine
  modified_base 11: mod_base = OTHER; note = 2'-O-methoxyethyl-5'-methylcytidine
  modified_base 12: mod_base = OTHER; note = Locked nucleic acid
  modified_base 13: mod_base = OTHER; note = 2'-O-methoxyethyl-guanosine
  modified_base 14: mod_base = OTHER; note = 2'-O-methoxyethyl-adenosine
  modified_base 15: mod_base = OTHER; note = Locked nucleic acid
  modified_base 16: mod_base = OTHER; note = 2'-O-methoxyethyl-guanosine
ggctatgaaactgatg

SEQ ID NO: 481 - RNA, 16 nt, synthetic construct
  source 1..16: mol_type = other RNA
  modified_base 1: mod_base = OTHER; note = 2'-O-methoxyethyl-guanosine
  modified_base 2: mod_base = OTHER; note = Locked nucleic acid
  modified_base 3: mod_base = OTHER; note = 2'-O-methoxyethyl-5'-methylcytidine
  modified_base 4: mod_base = OTHER; note = 2'-O-methoxyethyl-thymidine
  modified_base 5: mod_base = OTHER; note = Locked nucleic acid
  modified_base 6: mod_base = OTHER; note = 2'-O-methoxyethyl-thymidine
  modified_base 7: mod_base = OTHER; note = 2'-O-methoxyethyl-guanosine
  modified_base 8: mod_base = OTHER; note = Locked nucleic acid
  modified_base 9: mod_base = OTHER; note = Locked nucleic acid
  modified_base 10: mod_base = OTHER; note = 2'-O-methoxyethyl-adenosine
  modified_base 11: mod_base = OTHER; note = 2'-O-methoxyethyl-5'-methylcytidine
  modified_base 12: mod_base = OTHER; note = Locked nucleic acid
  modified_base 13: mod_base = OTHER; note = 2'-O-methoxyethyl-guanosine
  modified_base 14: mod_base = OTHER; note = 2'-O-methoxyethyl-adenosine
  modified_base 15: mod_base = OTHER; note = Locked nucleic acid
  modified_base 16: mod_base = OTHER; note = 2'-O-methoxyethyl-guanosine
ggctatgaaactgatg

SEQ ID NO: 482 - RNA, 14 nt, synthetic construct
  source 1..14: mol_type = other RNA
  modified_base 1: mod_base = OTHER; note = 2'-O-methoxyethyl-guanosine
  modified_base 2: mod_base = OTHER; note = Locked nucleic acid
  modified_base 3: mod_base = OTHER; note = 2'-O-methoxyethyl-adenosine
  modified_base 4: mod_base = OTHER; note = 2'-O-methoxyethyl-adenosine
  modified_base 5: mod_base = OTHER; note = 5'-methylcytidine locked nucleic acid
  modified_base 6: mod_base = OTHER; note = 2'-O-methoxyethyl-thymidine
  modified_base 7: mod_base = OTHER; note = Locked nucleic acid
  modified_base 8: mod_base = OTHER; note = Locked nucleic acid
  modified_base 9: mod_base = OTHER; note = 2'-O-methoxyethyl-thymidine
  modified_base 10: mod_base = OTHER; note = Locked nucleic acid
  modified_base 11: mod_base = OTHER; note = 2'-O-methoxyethyl-guanosine
  modified_base 12: mod_base = OTHER; note = 2'-O-methoxyethyl-adenosine
  modified_base 13: mod_base = OTHER; note = Locked nucleic acid
  modified_base 14: mod_base = OTHER; note = 2'-O-methoxyethyl-adenosine
gaaactgatggaga

SEQ ID NO: 483 - RNA, 14 nt, synthetic construct
  source 1..14: mol_type = other RNA
  modified_base 1: mod_base = OTHER; note = 2'-O-methoxyethyl-adenosine
  modified_base 2: mod_base = OTHER; note = Locked nucleic acid
  modified_base 3: mod_base = OTHER; note = 2'-O-methoxyethyl-guanosine
  modified_base 4: mod_base = OTHER; note = 2'-O-methoxyethyl-adenosine
  modified_base 5: mod_base = OTHER; note = Locked nucleic acid
  modified_base 6: mod_base = OTHER; note = 2'-O-methoxyethyl-adenosine
  modified_base 7: mod_base = OTHER; note = 5'-methylcytidine locked nucleic acid
  modified_base 8: mod_base = OTHER; note = Locked nucleic acid
  modified_base 9: mod_base = OTHER; note = 2'-O-methoxyethyl-guanosine
  modified_base 10: mod_base = OTHER; note = Locked nucleic acid
  modified_base 11: mod_base = OTHER; note = 2'-O-methoxyethyl-thymidine
  modified_base 12: mod_base = OTHER; note = 2'-O-methoxyethyl-guanosine
  modified_base 13: mod_base = OTHER; note = Locked nucleic acid
  modified_base 14: mod_base = OTHER; note = 2'-O-methoxyethyl-adenosine
atgaaactgatgga

SEQ ID NO: 484 - RNA, 14 nt, synthetic construct
  source 1..14: mol_type = other RNA
  modified_base 1: mod_base = OTHER; note = 2'-O-methoxyethyl-5'-methylcytidine
  modified_base 2: mod_base = OTHER; note = Locked nucleic acid
  modified_base 3: mod_base = OTHER; note = 2'-O-methoxyethyl-adenosine
  modified_base 4: mod_base = OTHER; note = 2'-O-methoxyethyl-thymidine
  modified_base 5: mod_base = OTHER; note = Locked nucleic acid
  modified_base 6: mod_base = OTHER; note = 2'-O-methoxyethyl-adenosine
  modified_base 7: mod_base = OTHER; note = Locked nucleic acid
  modified_base 8: mod_base = OTHER; note = Locked nucleic acid
  modified_base 9: mod_base = OTHER; note = 2'-O-methoxyethyl-5'-methylcytidine
  modified_base 10: mod_base = OTHER; note = Locked nucleic acid
  modified_base 11: mod_base = OTHER; note = 2'-O-methoxyethyl-guanosine
  modified_base 12: mod_base = OTHER; note = 2'-O-methoxyethyl-adenosine
  modified_base 13: mod_base = OTHER; note = Locked nucleic acid
  modified_base 14: mod_base = OTHER; note = 2'-O-methoxyethyl-guanosine
ctatgaaactgatg

SEQ ID NO: 485 - RNA, 14 nt, synthetic construct
  source 1..14: mol_type = other RNA
  modified_base 1: mod_base = OTHER; note = 2'-O-methoxyethyl-guanosine
  modified_base 2: mod_base = OTHER; note = Locked nucleic acid
  modified_base 3: mod_base = OTHER; note = 2'-O-methoxyethyl-5'-methylcytidine
  modified_base 4: mod_base = OTHER; note = 2'-O-methoxyethyl-thymidine
  modified_base 5: mod_base = OTHER; note = Locked nucleic acid
  modified_base 6: mod_base = OTHER; note = 2'-O-methoxyethyl-thymidine
  modified_base 7: mod_base = OTHER; note = Locked nucleic acid
  modified_base 8: mod_base = OTHER; note = Locked nucleic acid
  modified_base 9: mod_base = OTHER; note = 2'-O-methoxyethyl-adenosine
  modified_base 10: mod_base = OTHER; note = Locked nucleic acid
  modified_base 11: mod_base = OTHER; note = 2'-O-methoxyethyl-5'-methylcytidine
  modified_base 12: mod_base = OTHER; note = 2'-O-methoxyethyl-thymidine
  modified_base 13: mod_base = OTHER; note = Locked nucleic acid
  modified_base 14: mod_base = OTHER; note = 2'-O-methoxyethyl-adenosine
ggctatgaaactga

SEQ ID NO: 486 - DNA, 22 bp, synthetic construct
  source 1..22: mol_type = other DNA
  modified_base 1..22: mod_base = OTHER; note = This sequence encompasses a phosphorodiamidate morpholino backbone
tagaggctgtgatgggaataaa

SEQ ID NO: 487 - DNA, 24 bp, synthetic construct
  source 1..24: mol_type = other DNA
  modified_base 1..24: mod_base = OTHER; note = This sequence encompasses a phosphorodiamidate morpholino backbone
tagaggctgtgatgggaataaaat

SEQ ID NO: 488 - DNA, 22 bp, synthetic construct
  source 1..22: mol_type = other DNA
  modified_base 1..22: mod_base = OTHER; note = This sequence encompasses a phosphorodiamidate morpholino backbone
atagaggctgtgatgggaataa

SEQ ID NO: 489 - DNA, 24 bp, synthetic construct
  source 1..24: mol_type = other DNA
  modified_base 1..24: mod_base = OTHER; note = This sequence encompasses a phosphorodiamidate morpholino backbone
atagaggctgtgatgggaataaaa

SEQ ID NO: 490 - DNA, 25 bp, synthetic construct
  source 1..25: mol_type = other DNA
  modified_base 1..25: mod_base = OTHER; note = This sequence encompasses a phosphorodiamidate morpholino backbone
atagaggctgtgatgggaataaaat

SEQ ID NO: 491 - DNA, 25 bp, synthetic construct
  source 1..25: mol_type = other DNA
  modified_base 1..25: mod_base = OTHER; note = This sequence encompasses a phosphorodiamidate morpholino backbone
aaagatagaggctgtgatgggaata

SEQ ID NO: 492 - DNA, 21 bp, synthetic construct
  source 1..21: mol_type = other DNA
  modified_base 1..21: mod_base = OTHER; note = This sequence encompasses a phosphorodiamidate morpholino backbone
ggctatgaaactgatggagaa

SEQ ID NO: 493 - DNA, 22 bp, synthetic construct
  source 1..22: mol_type = other DNA
  modified_base 1..22: mod_base = OTHER; note = This sequence encompasses a phosphorodiamidate morpholino backbone
ggctatgaaactgatggagaaa

SEQ ID NO: 494 - DNA, 24 bp, synthetic construct
  source 1..24: mol_type = other DNA
  modified_base 1..24: mod_base = OTHER; note = This sequence encompasses a phosphorodiamidate morpholino backbone
ggctatgaaactgatggagaaaga

SEQ ID NO: 495 - DNA, 25 bp, synthetic construct
  source 1..25: mol_type = other DNA
  modified_base 1..25: mod_base = OTHER; note = This sequence encompasses a phosphorodiamidate morpholino backbone
agggctatgaaactgatggagaaag

SEQ ID NO: 496 - RNA, 18 nt, synthetic construct
  source 1..18: mol_type = other RNA
  modified_base 1: mod_base = OTHER; note = 2'-O-methoxyethyl-5'-methylcytidine
  modified_base 2: mod_base = OTHER; note = 2'-O-methoxyethyl-adenosine
  modified_base 3: mod_base = OTHER; note = 2'-O-methoxyethyl-thymidine
  modified_base 4: mod_base = OTHER; note = 2'-O-methoxyethyl-thymidine
  modified_base 5: mod_base = OTHER; note = 2'-O-methoxyethyl-thymidine
  modified_base 6: mod_base = OTHER; note = 2'-O-methoxyethyl-adenosine
  modified_base 7: mod_base = OTHER; note = 2'-O-methoxyethyl-adenosine
  modified_base 8: mod_base = OTHER; note = 2'-O-methoxyethyl-thymidine
  modified_base 9: mod_base = OTHER; note = 2'-O-methoxyethyl-thymidine
  modified_base 10: mod_base = OTHER; note = 2'-O-methoxyethyl-adenosine
  modified_base 11: mod_base = OTHER; note = 2'-O-methoxyethyl-adenosine
  modified_base 12: mod_base = OTHER; note = 2'-O-methoxyethyl-adenosine
  modified_base 13: mod_base = OTHER; note = 2'-O-methoxyethyl-thymidine
  modified_base 14: mod_base = OTHER; note = 2'-O-methoxyethyl-thymidine
  modified_base 15: mod_base = OTHER; note = 2'-O-methoxyethyl-adenosine
  modified_base 16: mod_base = OTHER; note = 2'-O-methoxyethyl-thymidine
  modified_base 17: mod_base = OTHER; note = 2'-O-methoxyethyl-adenosine
  modified_base 18: mod_base = OTHER; note = 2'-O-methoxyethyl-thymidine
catttaattaaattatat

SEQ ID NO: 497 - RNA, 18 nt, synthetic construct
  source 1..18: mol_type = other RNA
  modified_base 1: mod_base = OTHER; note = 2'-O-methoxyethyl-5'-methylcytidine
  modified_base 2: mod_base = OTHER; note = 2'-O-methoxyethyl-5'-methylcytidine
  modified_base 3: mod_base = OTHER; note = 2'-O-methoxyethyl-adenosine
  modified_base 4: mod_base = OTHER; note = 2'-O-methoxyethyl-thymidine
  modified_base 5: mod_base = OTHER; note = 2'-O-methoxyethyl-thymidine
  modified_base 6: mod_base = OTHER; note = 2'-O-methoxyethyl-thymidine
  modified_base 7: mod_base = OTHER; note = 2'-O-methoxyethyl-adenosine
  modified_base 8: mod_base = OTHER; note = 2'-O-methoxyethyl-adenosine
  modified_base 9: mod_base = OTHER; note = 2'-O-methoxyethyl-thymidine
  modified_base 10: mod_base = OTHER; note = 2'-O-methoxyethyl-thymidine
  modified_base 11: mod_base = OTHER; note = 2'-O-methoxyethyl-adenosine
  modified_base 12: mod_base = OTHER; note = 2'-O-methoxyethyl-adenosine
  modified_base 13: mod_base = OTHER; note = 2'-O-methoxyethyl-adenosine
  modified_base 14: mod_base = OTHER; note = 2'-O-methoxyethyl-thymidine
  modified_base 15: mod_base = OTHER; note = 2'-O-methoxyethyl-thymidine
  modified_base 16: mod_base = OTHER; note = 2'-O-methoxyethyl-adenosine
  modified_base 17: mod_base = OTHER; note = 2'-O-methoxyethyl-thymidine
  modified_base 18: mod_base = OTHER; note = 2'-O-methoxyethyl-adenosine
ccatttaattaaattata

SEQ ID NO: 498 - RNA, 18 nt, synthetic construct
  source 1..18: mol_type = other RNA
  modified_base 1: mod_base = OTHER; note = 2'-O-methoxyethyl-5'-methylcytidine
  modified_base 2: mod_base = OTHER; note = 2'-O-methoxyethyl-5'-methylcytidine
  modified_base 3: mod_base = OTHER; note = 2'-O-methoxyethyl-5'-methylcytidine
  modified_base 4: mod_base = OTHER; note = 2'-O-methoxyethyl-adenosine
  modified_base 5: mod_base = OTHER; note = 2'-O-methoxyethyl-thymidine
  modified_base 6: mod_base = OTHER; note = 2'-O-methoxyethyl-thymidine
  modified_base 7: mod_base = OTHER; note = 2'-O-methoxyethyl-thymidine
  modified_base 8: mod_base = OTHER; note = 2'-O-methoxyethyl-adenosine
  modified_base 9: mod_base = OTHER; note = 2'-O-methoxyethyl-adenosine
  modified_base 10: mod_base = OTHER; note = 2'-O-methoxyethyl-thymidine
  modified_base 11: mod_base = OTHER; note = 2'-O-methoxyethyl-thymidine
  modified_base 12: mod_base = OTHER; note = 2'-O-methoxyethyl-adenosine
  modified_base 13: mod_base = OTHER; note = 2'-O-methoxyethyl-adenosine
  modified_base 14: mod_base = OTHER; note = 2'-O-methoxyethyl-adenosine
  modified_base 15: mod_base = OTHER; note = 2'-O-methoxyethyl-thymidine
  modified_base 16: mod_base = OTHER; note = 2'-O-methoxyethyl-thymidine
  modified_base 17: mod_base = OTHER; note = 2'-O-methoxyethyl-adenosine
  modified_base 18: mod_base = OTHER; note = 2'-O-methoxyethyl-thymidine
cccatttaattaaattat

SEQ ID NO: 499 - RNA, 18 nt, synthetic construct
  source 1..18: mol_type = other RNA
  modified_base 1: mod_base = OTHER; note = 2'-O-methoxyethyl-adenosine
  modified_base 2: mod_base = OTHER; note = 2'-O-methoxyethyl-5'-methylcytidine
  modified_base 3: mod_base = OTHER; note = 2'-O-methoxyethyl-5'-methylcytidine
  modified_base 4: mod_base = OTHER; note = 2'-O-methoxyethyl-5'-methylcytidine
  modified_base 5: mod_base = OTHER; note = 2'-O-methoxyethyl-adenosine
  modified_base 6: mod_base = OTHER; note = 2'-O-methoxyethyl-thymidine
  modified_base 7: mod_base = OTHER; note = 2'-O-methoxyethyl-thymidine
  modified_base 8: mod_base = OTHER; note = 2'-O-methoxyethyl-thymidine
  modified_base 9: mod_base = OTHER; note = 2'-O-methoxyethyl-adenosine
  modified_base 10: mod_base = OTHER; note = 2'-O-methoxyethyl-adenosine
  modified_base 11: mod_base = OTHER; note = 2'-O-methoxyethyl-thymidine
  modified_base 12: mod_base = OTHER; note = 2'-O-methoxyethyl-thymidine
  modified_base 13: mod_base = OTHER; note = 2'-O-methoxyethyl-adenosine
  modified_base 14: mod_base = OTHER; note = 2'-O-methoxyethyl-adenosine
  modified_base 15: mod_base = OTHER; note = 2'-O-methoxyethyl-adenosine
  modified_base 16: mod_base = OTHER; note = 2'-O-methoxyethyl-thymidine
  modified_base 17: mod_base = OTHER; note = 2'-O-methoxyethyl-thymidine
  modified_base 18: mod_base = OTHER; note = 2'-O-methoxyethyl-adenosine
acccatttaattaaatta

SEQ ID NO: 500 - RNA, 18 nt, synthetic construct
  source 1..18: mol_type = other RNA
  modified_base 1: mod_base = OTHER; note = 2'-O-methoxyethyl-thymidine
  modified_base 2: mod_base = OTHER; note = 2'-O-methoxyethyl-adenosine
  modified_base 3: mod_base = OTHER; note = 2'-O-methoxyethyl-5'-methylcytidine
  modified_base 4: mod_base = OTHER; note = 2'-O-methoxyethyl-5'-methylcytidine
  modified_base 5: mod_base = OTHER; note = 2'-O-methoxyethyl-5'-methylcytidine
  modified_base 6: mod_base = OTHER; note = 2'-O-methoxyethyl-adenosine
  modified_base 7: mod_base = OTHER; note = 2'-O-methoxyethyl-thymidine
  modified_base 8: mod_base = OTHER; note = 2'-O-methoxyethyl-thymidine
  modified_base 9: mod_base = OTHER; note = 2'-O-methoxyethyl-thymidine
  modified_base 10: mod_base = OTHER; note = 2'-O-methoxyethyl-adenosine
  modified_base 11: mod_base = OTHER; note = 2'-O-methoxyethyl-adenosine
  modified_base 12: mod_base = OTHER; note = 2'-O-methoxyethyl-thymidine
  modified_base 13: mod_base = OTHER; note = 2'-O-methoxyethyl-thymidine
  modified_base 14: mod_base = OTHER; note = 2'-O-methoxyethyl-adenosine
  modified_base 15: mod_base = OTHER; note = 2'-O-methoxyethyl-adenosine
  modified_base 16: mod_base = OTHER; note = 2'-O-methoxyethyl-adenosine
  modified_base 17: mod_base = OTHER; note = 2'-O-methoxyethyl-thymidine
  modified_base 18: mod_base = OTHER; note = 2'-O-methoxyethyl-thymidine
tacccatttaattaaatt

SEQ ID NO: 501 - RNA, 18 nt, synthetic construct
  source 1..18: mol_type = other RNA
  modified_base 1: mod_base = OTHER; note = 2'-O-methoxyethyl-thymidine
  modified_base 2: mod_base = OTHER; note = 2'-O-methoxyethyl-thymidine
  modified_base 3: mod_base = OTHER; note = 2'-O-methoxyethyl-adenosine
  modified_base 4: mod_base = OTHER; note = 2'-O-methoxyethyl-5'-methylcytidine
  modified_base 5: mod_base = OTHER; note = 2'-O-methoxyethyl-5'-methylcytidine
  modified_base 6: mod_base = OTHER; note = 2'-O-methoxyethyl-5'-methylcytidine
  modified_base 7: mod_base = OTHER; note = 2'-O-methoxyethyl-adenosine
  modified_base 8: mod_base = OTHER; note = 2'-O-methoxyethyl-thymidine
  modified_base 9: mod_base = OTHER; note = 2'-O-methoxyethyl-thymidine
  modified_base 10: mod_base = OTHER; note = 2'-O-methoxyethyl-thymidine
  modified_base 11: mod_base = OTHER; note = 2'-O-methoxyethyl-adenosine
  modified_base 12: mod_base = OTHER; note = 2'-O-methoxyethyl-adenosine
  modified_base 13: mod_base = OTHER; note = 2'-O-methoxyethyl-thymidine
  modified_base 14: mod_base = OTHER; note = 2'-O-methoxyethyl-thymidine
  modified_base 15: mod_base = OTHER; note = 2'-O-methoxyethyl-adenosine
  modified_base 16: mod_base = OTHER; note = 2'-O-methoxyethyl-adenosine
  modified_base 17: mod_base = OTHER; note = 2'-O-methoxyethyl-adenosine
  modified_base 18: mod_base = OTHER; note = 2'-O-methoxyethyl-thymidine
ttacccatttaattaaat

SEQ ID NO: 502 - RNA, 18 nt, synthetic construct
  source 1..18: mol_type = other RNA
  modified_base 1: mod_base = OTHER; note = 2'-O-methoxyethyl-5'-methylcytidine
  modified_base 2: mod_base = OTHER; note = 2'-O-methoxyethyl-thymidine
  modified_base 3: mod_base = OTHER; note = 2'-O-methoxyethyl-thymidine
  modified_base 4: mod_base = OTHER; note = 2'-O-methoxyethyl-adenosine
  modified_base 5: mod_base = OTHER; note = 2'-O-methoxyethyl-5'-methylcytidine
  modified_base 6: mod_base = OTHER; note = 2'-O-methoxyethyl-5'-methylcytidine
  modified_base 7: mod_base = OTHER; note = 2'-O-methoxyethyl-5'-methylcytidine
  modified_base 8: mod_base = OTHER; note = 2'-O-methoxyethyl-adenosine
  modified_base 9: mod_base = OTHER; note = 2'-O-methoxyethyl-thymidine
  modified_base 10: mod_base = OTHER; note = 2'-O-methoxyethyl-thymidine
  modified_base 11: mod_base = OTHER; note = 2'-O-methoxyethyl-thymidine
  modified_base 12: mod_base = OTHER; note = 2'-O-methoxyethyl-adenosine
  modified_base 13: mod_base = OTHER; note = 2'-O-methoxyethyl-adenosine
  modified_base 14: mod_base = OTHER; note = 2'-O-methoxyethyl-thymidine
  modified_base 15: mod_base = OTHER; note = 2'-O-methoxyethyl-thymidine
  modified_base 16: mod_base = OTHER; note = 2'-O-methoxyethyl-adenosine
  modified_base 17: mod_base = OTHER; note = 2'-O-methoxyethyl-adenosine
  modified_base 18: mod_base = OTHER; note = 2'-O-methoxyethyl-adenosine
cttacccatttaattaaa

SEQ ID NO: 503 - RNA, 18 nt, synthetic construct
  source 1..18: mol_type = other RNA
  modified_base 1: mod_base = OTHER; note = 2'-O-methoxyethyl-thymidine
  modified_base 2: mod_base = OTHER; note = 2'-O-methoxyethyl-5'-methylcytidine
  modified_base 3: mod_base = OTHER; note = 2'-O-methoxyethyl-thymidine
  modified_base 4: mod_base = OTHER; note = 2'-O-methoxyethyl-thymidine
  modified_base 5: mod_base = OTHER; note = 2'-O-methoxyethyl-adenosine
  modified_base 6: mod_base = OTHER; note = 2'-O-methoxyethyl-5'-methylcytidine
  modified_base 7: mod_base = OTHER; note = 2'-O-methoxyethyl-5'-methylcytidine
  modified_base 8: mod_base = OTHER; note = 2'-O-methoxyethyl-5'-methylcytidine
  modified_base 9: mod_base = OTHER; note = 2'-O-methoxyethyl-adenosine
  modified_base 10: mod_base = OTHER; note = 2'-O-methoxyethyl-thymidine
  modified_base 11: mod_base = OTHER; note = 2'-O-methoxyethyl-thymidine
  modified_base 12: mod_base = OTHER; note = 2'-O-methoxyethyl-thymidine
  modified_base 13: mod_base = OTHER; note = 2'-O-methoxyethyl-adenosine
  modified_base 14: mod_base = OTHER; note = 2'-O-methoxyethyl-adenosine
  modified_base 15: mod_base = OTHER; note = 2'-O-methoxyethyl-thymidine
  modified_base 16: mod_base = OTHER; note = 2'-O-methoxyethyl-thymidine
  modified_base 17: mod_base = OTHER; note = 2'-O-methoxyethyl-adenosine
  modified_base 18: mod_base = OTHER; note = 2'-O-methoxyethyl-adenosine
tcttacccatttaattaa

SEQ ID NO: 504 - RNA, 17 nt, synthetic construct
  source 1..17: mol_type = other RNA
  modified_base 1: mod_base = OTHER; note = 2'-O-methoxyethyl-guanosine
  modified_base 2: mod_base = OTHER; note = 2'-O-methoxyethyl-adenosine
  modified_base 3: mod_base = OTHER; note = 2'-O-methoxyethyl-thymidine
  modified_base 4: mod_base = OTHER; note = 2'-O-methoxyethyl-adenosine
  modified_base 5: mod_base = OTHER; note = 2'-O-methoxyethyl-guanosine
  modified_base 6: mod_base = OTHER; note = 2'-O-methoxyethyl-adenosine
  modified_base 7: mod_base = OTHER; note = 2'-O-methoxyethyl-guanosine
  modified_base 8: mod_base = OTHER; note = 2'-O-methoxyethyl-guanosine
  modified_base 9: mod_base = OTHER; note = 2'-O-methoxyethyl-5'-methylcytidine
  modified_base 10: mod_base = OTHER; note = 2'-O-methoxyethyl-thymidine
  modified_base 11: mod_base = OTHER; note = 2'-O-methoxyethyl-guanosine
  modified_base 12: mod_base = OTHER; note = 2'-O-methoxyethyl-thymidine
  modified_base 13: mod_base = OTHER; note = 2'-O-methoxyethyl-guanosine
  modified_base 14: mod_base = OTHER; note = 2'-O-methoxyethyl-adenosine
  modified_base 15: mod_base = OTHER; note = 2'-O-methoxyethyl-thymidine
  modified_base 16: mod_base = OTHER; note = 2'-O-methoxyethyl-guanosine
  modified_base 17: mod_base = OTHER; note = 2'-O-methoxyethyl-guanosine
gatagaggctgtgatgg

SEQ ID NO: 505 - RNA, 18 nt, synthetic construct
  source 1..18: mol_type = other RNA
  modified_base 1: mod_base = OTHER; note = 2'-O-methoxyethyl-guanosine
  modified_base 2: mod_base = OTHER; note = 2'-O-methoxyethyl-guanosine
  modified_base 3: mod_base = OTHER; note = 2'-O-methoxyethyl-5'-methylcytidine
  modified_base 4: mod_base = OTHER; note = 2'-O-methoxyethyl-thymidine
  modified_base 5: mod_base = OTHER; note = 2'-O-methoxyethyl-guanosine
  modified_base 6: mod_base = OTHER; note = 2'-O-methoxyethyl-thymidine
  modified_base 7: mod_base = OTHER; note = 2'-O-methoxyethyl-guanosine
  modified_base 8: mod_base = OTHER; note = 2'-O-methoxyethyl-adenosine
  modified_base 9: mod_base = OTHER; note = 2'-O-methoxyethyl-adenosine
  modified_base 10: mod_base = OTHER; note = 2'-O-methoxyethyl-adenosine
  modified_base 11: mod_base = OTHER; note = 2'-O-methoxyethyl-5'-methylcytidine
  modified_base 12: mod_base = OTHER; note = 2'-O-methoxyethyl-thymidine
  modified_base 13: mod_base = OTHER; note = 2'-O-methoxyethyl-guanosine
  modified_base 14: mod_base = OTHER; note = 2'-O-methoxyethyl-adenosine
  modified_base 15: mod_base = OTHER; note = 2'-O-methoxyethyl-thymidine
  modified_base 16: mod_base = OTHER; note = 2'-O-methoxyethyl-guanosine
  modified_base 17: mod_base = OTHER; note = 2'-O-methoxyethyl-guanosine
  modified_base 18: mod_base = OTHER; note = 2'-O-methoxyethyl-adenosine
ggctgtgaaactgatgga

SEQ ID NO: 506 - RNA, 20 nt, synthetic construct
  source 1..20: mol_type = other RNA
  modified_base 1: mod_base = OTHER; note = 2'-O-methoxyethyl-guanosine
  modified_base 2: mod_base = OTHER; note = 2'-O-methoxyethyl-guanosine
  modified_base 3: mod_base = OTHER; note = 2'-O-methoxyethyl-5'-methylcytidine
  modified_base 4: mod_base = OTHER; note = 2'-O-methoxyethyl-thymidine
  modified_base 5: mod_base = OTHER; note = 2'-O-methoxyethyl-guanosine
  modified_base 6: mod_base = OTHER; note = 2'-O-methoxyethyl-thymidine
  modified_base 7: mod_base = OTHER; note = 2'-O-methoxyethyl-guanosine
  modified_base 8: mod_base = OTHER; note = 2'-O-methoxyethyl-adenosine
  modified_base 9: mod_base = OTHER; note = 2'-O-methoxyethyl-adenosine
  modified_base 10: mod_base = OTHER; note = 2'-O-methoxyethyl-adenosine
  modified_base 11: mod_base = OTHER; note = 2'-O-methoxyethyl-5'-methylcytidine
  modified_base 12: mod_base = OTHER; note = 2'-O-methoxyethyl-thymidine
  modified_base 13: mod_base = OTHER; note = 2'-O-methoxyethyl-guanosine
  modified_base 14: mod_base = OTHER; note = 2'-O-methoxyethyl-adenosine
  modified_base 15: mod_base = OTHER; note = 2'-O-methoxyethyl-thymidine
  modified_base 16: mod_base = OTHER; note = 2'-O-methoxyethyl-guanosine
  modified_base 17: mod_base = OTHER; note = 2'-O-methoxyethyl-guanosine
  modified_base 18: mod_base = OTHER; note = 2'-O-methoxyethyl-adenosine
  modified_base 19: mod_base = OTHER; note = 2'-O-methoxyethyl-guanosine
  modified_base 20: mod_base = OTHER; note = 2'-O-methoxyethyl-adenosine
ggctgtgaaactgatggaga

SEQ ID NO: 507 - RNA, 16 nt, synthetic construct
  source 1..16: mol_type = other RNA
  modified_base 1: mod_base = OTHER; note = 2'-O-methoxyethyl-5'-methylcytidine
  modified_base 2: mod_base = OTHER; note = 2'-O-methoxyethyl-thymidine
  modified_base 3: mod_base = OTHER; note = 2'-O-methoxyethyl-adenosine
  modified_base 4: mod_base = OTHER; note = 2'-O-methoxyethyl-thymidine
  modified_base 5: mod_base = OTHER; note = 2'-O-methoxyethyl-guanosine
  modified_base 6: mod_base = OTHER; note = 2'-O-methoxyethyl-adenosine
  modified_base 7: mod_base = OTHER; note = 2'-O-methoxyethyl-adenosine
  modified_base 8: mod_base = OTHER; note = 2'-O-methoxyethyl-adenosine
  modified_base 9: mod_base = OTHER; note = 2'-O-methoxyethyl-5'-methylcytidine
  modified_base 10: mod_base = OTHER; note = 2'-O-methoxyethyl-thymidine
  modified_base 11: mod_base = OTHER; note = 2'-O-methoxyethyl-guanosine
  modified_base 12: mod_base = OTHER; note = 2'-O-methoxyethyl-adenosine
  modified_base 13: mod_base = OTHER; note = 2'-O-methoxyethyl-thymidine
  modified_base 14: mod_base = OTHER; note = 2'-O-methoxyethyl-guanosine
  modified_base 15: mod_base = OTHER; note = 2'-O-methoxyethyl-guanosine
  modified_base 16: mod_base = OTHER; note = 2'-O-methoxyethyl-adenosine
ctatgaaactgatgga

SEQ ID NO: 508 - RNA, 16 nt, synthetic construct
  source 1..16: mol_type = other RNA
  modified_base 1: mod_base = OTHER; note = 2'-O-methoxyethyl-guanosine
  modified_base 2: mod_base = OTHER; note = 2'-O-methoxyethyl-5'-methylcytidine
  modified_base 3: mod_base = OTHER; note = 2'-O-methoxyethyl-thymidine
  modified_base 4: mod_base = OTHER; note = 2'-O-methoxyethyl-adenosine
  modified_base 5: mod_base = OTHER; note = 2'-O-methoxyethyl-thymidine
  modified_base 6: mod_base = OTHER; note = 2'-O-methoxyethyl-guanosine
  modified_base 7: mod_base = OTHER; note = 2'-O-methoxyethyl-adenosine
  modified_base 8: mod_base = OTHER; note = 2'-O-methoxyethyl-adenosine
  modified_base 9: mod_base = OTHER; note = 2'-O-methoxyethyl-adenosine
  modified_base 10: mod_base = OTHER; note = 2'-O-methoxyethyl-5'-methylcytidine
  modified_base 11: mod_base = OTHER; note = 2'-O-methoxyethyl-thymidine
  modified_base 12: mod_base = OTHER; note = 2'-O-methoxyethyl-guanosine
  modified_base 13: mod_base = OTHER; note = 2'-O-methoxyethyl-adenosine
  modified_base 14: mod_base = OTHER; note = 2'-O-methoxyethyl-thymidine
  modified_base 15: mod_base = OTHER; note = 2'-O-methoxyethyl-guanosine
  modified_base 16: mod_base = OTHER; note = 2'-O-methoxyethyl-guanosine
gctatgaaactgatgg

SEQ ID NO: 509 - RNA, 16 nt, synthetic construct
  source 1..16: mol_type = other RNA
  modified_base 1: mod_base = OTHER; note = 2'-O-methoxyethyl-guanosine
  modified_base 2: mod_base = OTHER; note = 2'-O-methoxyethyl-guanosine
  modified_base 3: mod_base = OTHER; note = 2'-O-methoxyethyl-5'-methylcytidine
  modified_base 4: mod_base = OTHER; note = 2'-O-methoxyethyl-thymidine
  modified_base 5: mod_base = OTHER; note = 2'-O-methoxyethyl-adenosine
  modified_base 6: mod_base = OTHER; note = 2'-O-methoxyethyl-thymidine
  modified_base 7: mod_base = OTHER; note = 2'-O-methoxyethyl-guanosine
  modified_base 8: mod_base = OTHER; note = 2'-O-methoxyethyl-adenosine
  modified_base 9: mod_base = OTHER; note = 2'-O-methoxyethyl-adenosine
  modified_base 10: mod_base = OTHER; note = 2'-O-methoxyethyl-adenosine
  modified_base 11: mod_base = OTHER; note = 2'-O-methoxyethyl-5'-methylcytidine
  modified_base 12: mod_base = OTHER; note = 2'-O-methoxyethyl-thymidine
  modified_base 13: mod_base = OTHER; note = 2'-O-methoxyethyl-guanosine
  modified_base 14: mod_base = OTHER; note = 2'-O-methoxyethyl-adenosine
  modified_base 15: mod_base = OTHER; note = 2'-O-methoxyethyl-thymidine
  modified_base 16: mod_base = OTHER; note = 2'-O-methoxyethyl-guanosine
ggctatgaaactgatg

SEQ ID NO: 510 - RNA, 14 nt, synthetic construct
  source 1..14: mol_type = other RNA
  modified_base 1: mod_base = OTHER; note = 2'-O-methoxyethyl-adenosine
  modified_base 2: mod_base = OTHER; note = 2'-O-methoxyethyl-thymidine
  modified_base 3: mod_base = OTHER; note = 2'-O-methoxyethyl-guanosine
  modified_base 4: mod_base = OTHER; note = 2'-O-methoxyethyl-adenosine
  modified_base 5: mod_base = OTHER; note = 2'-O-methoxyethyl-adenosine
  modified_base 6: mod_base = OTHER; note = 2'-O-methoxyethyl-adenosine
  modified_base 7: mod_base = OTHER; note = 2'-O-methoxyethyl-5'-methylcytidine
  modified_base 8: mod_base = OTHER; note = 2'-O-methoxyethyl-thymidine
  modified_base 9: mod_base = OTHER; note = 2'-O-methoxyethyl-guanosine
  modified_base 10: mod_base = OTHER; note = 2'-O-methoxyethyl-adenosine
  modified_base 11: mod_base = OTHER; note = 2'-O-methoxyethyl-thymidine
  modified_base 12: mod_base = OTHER; note = 2'-O-methoxyethyl-guanosine
  modified_base 13: mod_base = OTHER; note = 2'-O-methoxyethyl-guanosine
  modified_base 14: mod_base = OTHER; note = 2'-O-methoxyethyl-adenosine
atgaaactgatgga

SEQ ID NO: 511 - RNA, 14 nt, synthetic construct
  source 1..14: mol_type = other RNA
  modified_base 1: mod_base = OTHER; note = 2'-O-methoxyethyl-thymidine
  modified_base 2: mod_base = OTHER; note = 2'-O-methoxyethyl-adenosine
  modified_base 3: mod_base = OTHER; note = 2'-O-methoxyethyl-thymidine
  modified_base 4: mod_base = OTHER; note = 2'-O-methoxyethyl-guanosine
  modified_base 5: mod_base = OTHER; note = 2'-O-methoxyethyl-adenosine
  modified_base 6: mod_base = OTHER; note = 2'-O-methoxyethyl-adenosine
  modified_base 7: mod_base = OTHER; note = 2'-O-methoxyethyl-adenosine
  modified_base 8: mod_base = OTHER; note = 2'-O-methoxyethyl-5'-methylcytidine
  modified_base 9: mod_base = OTHER; note = 2'-O-methoxyethyl-thymidine
  modified_base 10: mod_base = OTHER; note = 2'-O-methoxyethyl-guanosine
  modified_base 11: mod_base = OTHER; note = 2'-O-methoxyethyl-adenosine
  modified_base 12: mod_base = OTHER; note = 2'-O-methoxyethyl-thymidine
  modified_base 13: mod_base = OTHER; note = 2'-O-methoxyethyl-guanosine
  modified_base 14: mod_base = OTHER; note = 2'-O-methoxyethyl-guanosine
tatgaaactgatgg

SEQ ID NO: 512 - RNA, 14 nt, synthetic construct
  source 1..14: mol_type = other RNA
  modified_base 1: mod_base = OTHER; note = 2'-O-methoxyethyl-5'-methylcytidine
  modified_base 2: mod_base = OTHER; note = 2'-O-methoxyethyl-thymidine
  modified_base 3: mod_base = OTHER; note = 2'-O-methoxyethyl-adenosine
  modified_base 4: mod_base = OTHER; note = 2'-O-methoxyethyl-thymidine
  modified_base 5: mod_base = OTHER; note = 2'-O-methoxyethyl-guanosine
  modified_base 6: mod_base = OTHER; note = 2'-O-methoxyethyl-adenosine
  modified_base 7: mod_base = OTHER; note = 2'-O-methoxyethyl-adenosine
  modified_base 8: mod_base = OTHER; note = 2'-O-methoxyethyl-adenosine
  modified_base 9: mod_base = OTHER; note = 2'-O-methoxyethyl-5'-methylcytidine
  modified_base 10: mod_base = OTHER; note = 2'-O-methoxyethyl-thymidine
  modified_base 11: mod_base = OTHER; note = 2'-O-methoxyethyl-guanosine
  modified_base 12: mod_base = OTHER; note = 2'-O-methoxyethyl-adenosine
  modified_base 13: mod_base = OTHER; note = 2'-O-methoxyethyl-thymidine
  modified_base 14: mod_base = OTHER; note = 2'-O-methoxyethyl-guanosine
ctatgaaactgatg

SEQ ID NO: 513 - RNA, 14 nt, synthetic construct
  source 1..14: mol_type = other RNA
  modified_base 1: mod_base = OTHER; note = 2'-O-methoxyethyl-guanosine
  modified_base 2: mod_base = OTHER; note = 2'-O-methoxyethyl-5'-methylcytidine
  modified_base 3: mod_base = OTHER; note = 2'-O-methoxyethyl-thymidine
  modified_base 4: mod_base = OTHER; note = 2'-O-methoxyethyl-adenosine
  modified_base 5: mod_base = OTHER; note = 2'-O-methoxyethyl-thymidine
  modified_base 6: mod_base = OTHER; note = 2'-O-methoxyethyl-guanosine
  modified_base 7: mod_base = OTHER; note = 2'-O-methoxyethyl-adenosine
  modified_base 8: mod_base = OTHER; note = 2'-O-methoxyethyl-adenosine
  modified_base 9: mod_base = OTHER; note = 2'-O-methoxyethyl-adenosine
  modified_base 10: mod_base = OTHER; note = 2'-O-methoxyethyl-5'-methylcytidine
  modified_base 11: mod_base = OTHER; note = 2'-O-methoxyethyl-thymidine
  modified_base 12: mod_base = OTHER; note = 2'-O-methoxyethyl-guanosine
  modified_base 13: mod_base = OTHER; note = 2'-O-methoxyethyl-adenosine
  modified_base 14: mod_base = OTHER; note = 2'-O-methoxyethyl-thymidine
gctatgaaactgat

SEQ ID NO: 514 - RNA, 14 nt, synthetic construct
  source 1..14: mol_type = other RNA
  modified_base 1: mod_base = OTHER; note = 2'-O-methoxyethyl-guanosine
  modified_base 2: mod_base = OTHER; note = 2'-O-methoxyethyl-guanosine
  modified_base 3: mod_base = OTHER; note = 2'-O-methoxyethyl-5'-methylcytidine
  modified_base 4: mod_base = OTHER; note = 2'-O-methoxyethyl-thymidine
  modified_base 5: mod_base = OTHER; note = 2'-O-methoxyethyl-adenosine
  modified_base 6: mod_base = OTHER; note = 2'-O-methoxyethyl-thymidine
  modified_base 7: mod_base = OTHER; note = 2'-O-methoxyethyl-guanosine
  modified_base 8: mod_base = OTHER; note = 2'-O-methoxyethyl-adenosine
  modified_base 9: mod_base = OTHER; note = 2'-O-methoxyethyl-adenosine
  modified_base 10: mod_base = OTHER; note = 2'-O-methoxyethyl-adenosine
  modified_base 11: mod_base = OTHER; note = 2'-O-methoxyethyl-5'-methylcytidine
  modified_base 12: mod_base = OTHER; note = 2'-O-methoxyethyl-thymidine
  modified_base 13: mod_base = OTHER; note = 2'-O-methoxyethyl-guanosine
  modified_base 14: mod_base = OTHER; note = 2'-O-methoxyethyl-adenosine
ggctatgaaactga

SEQ ID NO: 515 - RNA, 20 nt, synthetic construct
  source 1..20: mol_type = other RNA
  modified_base 1: mod_base = OTHER; note = 2'-O-methoxyethyl-guanosine
  modified_base 2: mod_base = OTHER; note = 2'-O-methoxyethyl-5'-methylcytidine
  modified_base 3: mod_base = OTHER; note = 2'-O-methoxyethyl-thymidine
  modified_base 4: mod_base = OTHER; note = 2'-O-methoxyethyl-guanosine
  modified_base 5: mod_base = OTHER; note = 2'-O-methoxyethyl-thymidine
  modified_base 6: mod_base = OTHER; note = 2'-O-methoxyethyl-guanosine
  modified_base 7: mod_base = OTHER; note = 2'-O-methoxyethyl-adenosine
  modified_base 8: mod_base = OTHER; note = 2'-O-methoxyethyl-adenosine
  modified_base 9: mod_base = OTHER; note = 2'-O-methoxyethyl-adenosine
  modified_base 10: mod_base = OTHER; note = 2'-O-methoxyethyl-5'-methylcytidine
  modified_base 11: mod_base = OTHER; note = 2'-O-methoxyethyl-thymidine
  modified_base 12: mod_base = OTHER; note = 2'-O-methoxyethyl-guanosine
  modified_base 13: mod_base = OTHER; note = 2'-O-methoxyethyl-adenosine
  modified_base 14: mod_base = OTHER; note = 2'-O-methoxyethyl-thymidine
  modified_base 15: mod_base = OTHER; note = 2'-O-methoxyethyl-guanosine
  modified_base 16: mod_base = OTHER; note = 2'-O-methoxyethyl-guanosine
  modified_base 17: mod_base = OTHER; note = 2'-O-methoxyethyl-adenosine
  modified_base 18: mod_base = OTHER; note = 2'-O-methoxyethyl-guanosine
  modified_base 19: mod_base = OTHER; note = 2'-O-methoxyethyl-adenosine
  modified_base 20: mod_base = OTHER; note = 2'-O-methoxyethyl-adenosine
gctgtgaaactgatggagaa

SEQ ID NO: 516 - RNA, 20 nt, synthetic construct
  source 1..20: mol_type = other RNA
  modified_base 1: mod_base = OTHER; note = 2'-O-methoxyethyl-guanosine
  modified_base 2: mod_base = OTHER; note = 2'-O-methoxyethyl-guanosine
  modified_base 3: mod_base = OTHER; note = 2'-O-methoxyethyl-guanosine
  modified_base 4: mod_base = OTHER; note = 2'-O-methoxyethyl-5'-methylcytidine
  modified_base 5: mod_base = OTHER; note = 2'-O-methoxyethyl-thymidine
  modified_base 6: mod_base = OTHER; note = 2'-O-methoxyethyl-guanosine
  modified_base 7: mod_base = OTHER; note = 2'-O-methoxyethyl-thymidine
  modified_base 8: mod_base = OTHER; note = 2'-O-methoxyethyl-guanosine
  modified_base 9: mod_base = OTHER; note = 2'-O-methoxyethyl-adenosine
  modified_base 10: mod_base = OTHER; note = 2'-O-methoxyethyl-adenosine
  modified_base 11: mod_base = OTHER; note = 2'-O-methoxyethyl-adenosine
  modified_base 12: mod_base = OTHER; note = 2'-O-methoxyethyl-5'-methylcytidine
  modified_base 13: mod_base = OTHER; note = 2'-O-methoxyethyl-thymidine
  modified_base 14: mod_base = OTHER; note = 2'-O-methoxyethyl-guanosine
  modified_base 15: mod_base = OTHER; note = 2'-O-methoxyethyl-adenosine
  modified_base 16: mod_base = OTHER; note = 2'-O-methoxyethyl-thymidine
  modified_base 17: mod_base = OTHER; note = 2'-O-methoxyethyl-guanosine
  modified_base 18: mod_base = OTHER; note = 2'-O-methoxyethyl-guanosine
  modified_base 19: mod_base = OTHER; note = 2'-O-methoxyethyl-adenosine
  modified_base 20: mod_base = OTHER; note = 2'-O-methoxyethyl-guanosine
gggctgtgaaactgatggag

SEQ ID NO: 517 - RNA, 18 nt, synthetic construct
  source 1..18: mol_type = other RNA
  modified_base 1: mod_base = OTHER; note = 2'-O-methoxyethyl-thymidine
  modified_base 2: mod_base = OTHER; note = 2'-O-methoxyethyl-guanosine
  modified_base 3: mod_base = OTHER; note = 2'-O-methoxyethyl-thymidine
  modified_base 4: mod_base = OTHER; note = 2'-O-methoxyethyl-guanosine
  modified_base 5: mod_base = OTHER; note = 2'-O-methoxyethyl-adenosine
  modified_base 6: mod_base = OTHER; note = 2'-O-methoxyethyl-adenosine
  modified_base 7: mod_base = OTHER; note = 2'-O-methoxyethyl-adenosine
  modified_base 8: mod_base = OTHER; note = 2'-O-methoxyethyl-5'-methylcytidine
  modified_base 9: mod_base = OTHER; note = 2'-O-methoxyethyl-thymidine
  modified_base 10: mod_base = OTHER; note = 2'-O-methoxyethyl-guanosine
  modified_base 11: mod_base = OTHER; note = 2'-O-methoxyethyl-adenosine
  modified_base 12: mod_base = OTHER; note = 2'-O-methoxyethyl-thymidine
  modified_base 13: mod_base = OTHER; note = 2'-O-methoxyethyl-guanosine
  modified_base 14: mod_base = OTHER; note = 2'-O-methoxyethyl-guanosine
  modified_base 15: mod_base = OTHER; note = 2'-O-methoxyethyl-adenosine
  modified_base 16: mod_base = OTHER; note = 2'-O-methoxyethyl-guanosine
  modified_base 17: mod_base = OTHER; note = 2'-O-methoxyethyl-adenosine
  modified_base 18: mod_base = OTHER; note = 2'-O-methoxyethyl-adenosine
tgtgaaactgatggagaa

SEQ ID NO: 518 - RNA, 18 nt, synthetic construct
  source 1..18: mol_type = other RNA
  modified_base 1: mod_base = OTHER; note = 2'-O-methoxyethyl-5'-methylcytidine
  modified_base 2: mod_base = OTHER; note = 2'-O-methoxyethyl-thymidine
  modified_base 3: mod_base = OTHER; note = 2'-O-methoxyethyl-guanosine
  modified_base 4: mod_base = OTHER; note = 2'-O-methoxyethyl-thymidine
  modified_base 5: mod_base = OTHER; note = 2'-O-methoxyethyl-guanosine
  modified_base 6: mod_base = OTHER; note = 2'-O-methoxyethyl-adenosine
  modified_base 7: mod_base = OTHER; note = 2'-O-methoxyethyl-adenosine
  modified_base 8: mod_base = OTHER; note = 2'-O-methoxyethyl-adenosine
  modified_base 9: mod_base = OTHER; note = 2'-O-methoxyethyl-5'-methylcytidine
  modified_base 10: mod_base = OTHER; note = 2'-O-methoxyethyl-thymidine
  modified_base 11: mod_base = OTHER; note = 2'-O-methoxyethyl-guanosine
  modified_base 12: mod_base = OTHER; note = 2'-O-methoxyethyl-adenosine
  modified_base 13: mod_base = OTHER; note = 2'-O-methoxyethyl-thymidine
  modified_base 14: mod_base = OTHER; note = 2'-O-methoxyethyl-guanosine
  modified_base 15: mod_base = OTHER; note = 2'-O-methoxyethyl-guanosine
  modified_base 16: mod_base = OTHER; note = 2'-O-methoxyethyl-adenosine
  modified_base 17: mod_base = OTHER; note = 2'-O-methoxyethyl-guanosine
  modified_base 18: mod_base = OTHER; note = 2'-O-methoxyethyl-adenosine
ctgtgaaactgatggaga

SEQ ID NO: 519 - RNA, 18 nt, synthetic construct
  source 1..18: mol_type = other RNA
  modified_base 1: mod_base = OTHER; note = 2'-O-methoxyethyl-guanosine
  modified_base 2: mod_base = OTHER; note = 2'-O-methoxyethyl-5'-methylcytidine
  modified_base 3: mod_base = OTHER; note = 2'-O-methoxyethyl-thymidine
  modified_base 4: mod_base = OTHER; note = 2'-O-methoxyethyl-guanosine
  modified_base 5: mod_base = OTHER; note = 2'-O-methoxyethyl-thymidine
  modified_base 6: mod_base = OTHER; note = 2'-O-methoxyethyl-guanosine
  modified_base 7: mod_base = OTHER; note = 2'-O-methoxyethyl-adenosine
  modified_base 8: mod_base = OTHER; note = 2'-O-methoxyethyl-adenosine
  modified_base 9: mod_base = OTHER; note = 2'-O-methoxyethyl-adenosine
  modified_base 10: mod_base = OTHER; note = 2'-O-methoxyethyl-5'-methylcytidine
  modified_base 11: mod_base = OTHER; note = 2'-O-methoxyethyl-thymidine
  modified_base 12: mod_base = OTHER; note = 2'-O-methoxyethyl-guanosine
  modified_base 13: mod_base = OTHER; note = 2'-O-methoxyethyl-adenosine
  modified_base 14: mod_base = OTHER; note = 2'-O-methoxyethyl-thymidine
  modified_base 15: mod_base = OTHER; note = 2'-O-methoxyethyl-guanosine
  modified_base 16: mod_base = OTHER; note = 2'-O-methoxyethyl-guanosine
  modified_base 17: mod_base = OTHER; note = 2'-O-methoxyethyl-adenosine
  modified_base 18: mod_base = OTHER; note = 2'-O-methoxyethyl-guanosine
gctgtgaaactgatggag

SEQ ID NO: 520 - RNA, 18 nt, synthetic construct
  source 1..18: mol_type = other RNA
  modified_base 1: mod_base = OTHER; note = 2'-O-methoxyethyl-guanosine
  modified_base 2: mod_base = OTHER; note = 2'-O-methoxyethyl-guanosine
  modified_base 3: mod_base = OTHER; note = 2'-O-methoxyethyl-guanosine
  modified_base 4: mod_base = OTHER; note = 2'-O-methoxyethyl-5'-methylcytidine
  modified_base 5: mod_base = OTHER; note = 2'-O-methoxyethyl-thymidine
  modified_base 6: mod_base = OTHER; note = 2'-O-methoxyethyl-guanosine
  modified_base 7: mod_base = OTHER; note = 2'-O-methoxyethyl-thymidine
  modified_base 8: mod_base = OTHER; note = 2'-O-methoxyethyl-guanosine
  modified_base 9: mod_base = OTHER; note = 2'-O-methoxyethyl-adenosine
  modified_base 10: mod_base = OTHER; note = 2'-O-methoxyethyl-adenosine
  modified_base 11: mod_base = OTHER; note = 2'-O-methoxyethyl-adenosine
  modified_base 12: mod_base = OTHER; note = 2'-O-methoxyethyl-5'-methylcytidine
  modified_base 13: mod_base = OTHER; note = 2'-O-methoxyethyl-thymidine
  modified_base 14: mod_base = OTHER; note = 2'-O-methoxyethyl-guanosine
  modified_base 15: mod_base = OTHER; note = 2'-O-methoxyethyl-adenosine
  modified_base 16: mod_base = OTHER; note = 2'-O-methoxyethyl-thymidine
  modified_base 17: mod_base = OTHER; note = 2'-O-methoxyethyl-guanosine
  modified_base 18: mod_base = OTHER; note = 2'-O-methoxyethyl-guanosine
gggctgtgaaactgatgg

SEQ ID NO: 521 - RNA, 16 nt, synthetic construct
  source 1..16: mol_type = other RNA
  modified_base 1: mod_base = OTHER; note = 2'-O-methoxyethyl-thymidine
  modified_base 2: mod_base = OTHER; note = 2'-O-methoxyethyl-guanosine
  modified_base 3: mod_base = OTHER; note = 2'-O-methoxyethyl-adenosine
  modified_base 4: mod_base = OTHER; note = 2'-O-methoxyethyl-adenosine
  modified_base 5: mod_base = OTHER; note = 2'-O-methoxyethyl-adenosine
  modified_base 6: mod_base = OTHER; note = 2'-O-methoxyethyl-5'-methylcytidine
  modified_base 7: mod_base = OTHER; note = 2'-O-methoxyethyl-thymidine
  modified_base 8: mod_base = OTHER; note = 2'-O-methoxyethyl-guanosine
  modified_base 9: mod_base = OTHER; note = 2'-O-methoxyethyl-adenosine
  modified_base 10: mod_base = OTHER; note = 2'-O-methoxyethyl-thymidine
  modified_base 11: mod_base = OTHER; note = 2'-O-methoxyethyl-guanosine
  modified_base 12: mod_base = OTHER; note = 2'-O-methoxyethyl-guanosine
  modified_base 13: mod_base = OTHER; note = 2'-O-methoxyethyl-adenosine
  modified_base 14: mod_base = OTHER; note = 2'-O-methoxyethyl-guanosine
  modified_base 15: mod_base = OTHER; note = 2'-O-methoxyethyl-adenosine
  modified_base 16: mod_base = OTHER; note = 2'-O-methoxyethyl-adenosine
tgaaactgatggagaa

SEQ ID NO: 522 - RNA, 16 nt, synthetic construct
  source 1..16: mol_type = other RNA
  modified_base 1: mod_base = OTHER; note = 2'-O-methoxyethyl-guanosine
  modified_base 2: mod_base = OTHER; note = 2'-O-methoxyethyl-thymidine
  modified_base 3: mod_base = OTHER; note = 2'-O-methoxyethyl-guanosine
  modified_base 4: mod_base = OTHER; note = 2'-O-methoxyethyl-adenosine
  modified_base 5: mod_base = OTHER; note = 2'-O-methoxyethyl-adenosine
  modified_base 6: mod_base = OTHER; note = 2'-O-methoxyethyl-adenosine
  modified_base 7: mod_base = OTHER; note = 2'-O-methoxyethyl-5'-methylcytidine
  modified_base 8: mod_base = OTHER; note = 2'-O-methoxyethyl-thymidine
  modified_base 9: mod_base = OTHER; note = 2'-O-methoxyethyl-guanosine
  modified_base 10: mod_base = OTHER; note = 2'-O-methoxyethyl-adenosine
  modified_base 11: mod_base = OTHER; note = 2'-O-methoxyethyl-thymidine
  modified_base 12: mod_base = OTHER; note = 2'-O-methoxyethyl-guanosine
  modified_base 13: mod_base = OTHER; note = 2'-O-methoxyethyl-guanosine
  modified_base 14: mod_base = OTHER; note = 2'-O-methoxyethyl-adenosine
  modified_base 15: mod_base = OTHER; note = 2'-O-methoxyethyl-guanosine
  modified_base 16: mod_base = OTHER; note = 2'-O-methoxyethyl-adenosine
gtgaaactgatggaga

SEQ ID NO: 523 - RNA, 16 nt, synthetic construct
  source 1..16: mol_type = other RNA
  modified_base 1: mod_base = OTHER; note = 2'-O-methoxyethyl-thymidine
  modified_base 2: mod_base = OTHER; note = 2'-O-methoxyethyl-guanosine
  modified_base 3: mod_base = OTHER; note = 2'-O-methoxyethyl-thymidine
  modified_base 4: mod_base = OTHER; note = 2'-O-methoxyethyl-guanosine
  modified_base 5: mod_base = OTHER; note = 2'-O-methoxyethyl-adenosine
  modified_base 6: mod_base = OTHER; note = 2'-O-methoxyethyl-adenosine
  modified_base 7: mod_base = OTHER; note = 2'-O-methoxyethyl-adenosine
  modified_base 8: mod_base = OTHER; note = 2'-O-methoxyethyl-5'-methylcytidine
  modified_base 9: mod_base = OTHER; note = 2'-O-methoxyethyl-thymidine
  modified_base 10: mod_base = OTHER; note = 2'-O-methoxyethyl-guanosine
  modified_base 11: mod_base = OTHER; note = 2'-O-methoxyethyl-adenosine
  modified_base 12: mod_base = OTHER; note = 2'-O-methoxyethyl-thymidine
  modified_base 13: mod_base = OTHER; note = 2'-O-methoxyethyl-guanosine
  modified_base 14: mod_base = OTHER; note = 2'-O-methoxyethyl-guanosine
  modified_base 15: mod_base = OTHER; note = 2'-O-methoxyethyl-adenosine
  modified_base 16: mod_base = OTHER; note = 2'-O-methoxyethyl-guanosine
tgtgaaactgatggag

SEQ ID NO: 524 - RNA, 16 nt, synthetic construct
  source 1..16: mol_type = other RNA
  modified_base 1: mod_base = OTHER; note = 2'-O-methoxyethyl-5'-methylcytidine
  modified_base 2: mod_base = OTHER; note = 2'-O-methoxyethyl-thymidine
  modified_base 3: mod_base = OTHER; note = 2'-O-methoxyethyl-guanosine
  modified_base 4: mod_base = OTHER; note = 2'-O-methoxyethyl-thymidine
  modified_base 5: mod_base = OTHER; note = 2'-O-methoxyethyl-guanosine
  modified_base 6: mod_base = OTHER; note = 2'-O-methoxyethyl-adenosine
  modified_base 7: mod_base = OTHER; note = 2'-O-methoxyethyl-adenosine
  modified_base 8: mod_base = OTHER; note = 2'-O-methoxyethyl-adenosine
  modified_base 9: mod_base = OTHER; note = 2'-O-methoxyethyl-5'-methylcytidine
  modified_base 10: mod_base = OTHER; note = 2'-O-methoxyethyl-thymidine
  modified_base 11: mod_base = OTHER; note = 2'-O-methoxyethyl-guanosine
  modified_base 12: mod_base = OTHER; note = 2'-O-methoxyethyl-adenosine
  modified_base 13: mod_base = OTHER; note = 2'-O-methoxyethyl-thymidine
  modified_base 14: mod_base = OTHER; note = 2'-O-methoxyethyl-guanosine
  modified_base 15: mod_base = OTHER; note = 2'-O-methoxyethyl-guanosine
  modified_base 16: mod_base = OTHER; note = 2'-O-methoxyethyl-adenosine
ctgtgaaactgatgga

SEQ ID NO: 525 - RNA, 16 nt, synthetic construct
  source 1..16: mol_type = other RNA
  modified_base 1: mod_base = OTHER; note = 2'-O-methoxyethyl-guanosine
  modified_base 2: mod_base = OTHER; note = 2'-O-methoxyethyl-5'-methylcytidine
  modified_base 3: mod_base = OTHER; note = 2'-O-methoxyethyl-thymidine
  modified_base 4: mod_base = OTHER; note = 2'-O-methoxyethyl-guanosine
  modified_base 5: mod_base = OTHER; note = 2'-O-methoxyethyl-thymidine
  modified_base 6: mod_base = OTHER; note = 2'-O-methoxyethyl-guanosine
  modified_base 7: mod_base = OTHER; note = 2'-O-methoxyethyl-adenosine
  modified_base 8: mod_base = OTHER; note = 2'-O-methoxyethyl-adenosine
  modified_base 9: mod_base = OTHER; note = 2'-O-methoxyethyl-adenosine
  modified_base 10: mod_base = OTHER; note = 2'-O-methoxyethyl-5'-methylcytidine
  modified_base 11: mod_base = OTHER; note = 2'-O-methoxyethyl-thymidine
  modified_base 12: mod_base = OTHER; note = 2'-O-methoxyethyl-guanosine
  modified_base 13: mod_base = OTHER; note = 2'-O-methoxyethyl-adenosine
  modified_base 14: mod_base = OTHER; note = 2'-O-methoxyethyl-thymidine
  modified_base 15: mod_base = OTHER; note = 2'-O-methoxyethyl-guanosine
  modified_base 16: mod_base = OTHER; note = 2'-O-methoxyethyl-guanosine
gctgtgaaactgatgg

SEQ ID NO: 526 - RNA, 16 nt, synthetic construct
  source 1..16: mol_type = other RNA
  modified_base 1: mod_base = OTHER; note = 2'-O-methoxyethyl-guanosine
  modified_base 2: mod_base = OTHER; note = 2'-O-methoxyethyl-guanosine
  modified_base 3: mod_base = OTHER; note = 2'-O-methoxyethyl-5'-methylcytidine
  modified_base 4: mod_base = OTHER; note = 2'-O-methoxyethyl-thymidine
  modified_base 5: mod_base = OTHER; note = 2'-O-methoxyethyl-guanosine
  modified_base 6: mod_base = OTHER; note = 2'-O-methoxyethyl-thymidine
  modified_base 7: mod_base = OTHER; note = 2'-O-methoxyethyl-guanosine
  modified_base 8: mod_base = OTHER; note = 2'-O-methoxyethyl-adenosine
  modified_base 9: mod_base = OTHER; note = 2'-O-methoxyethyl-adenosine
  modified_base 10: mod_base = OTHER; note = 2'-O-methoxyethyl-adenosine
  modified_base 11: mod_base = OTHER; note = 2'-O-methoxyethyl-5'-methylcytidine
  modified_base 12: mod_base = OTHER; note = 2'-O-methoxyethyl-thymidine
  modified_base 13: mod_base = OTHER; note = 2'-O-methoxyethyl-guanosine
  modified_base 14: mod_base = OTHER; note = 2'-O-methoxyethyl-adenosine
  modified_base 15: mod_base = OTHER; note = 2'-O-methoxyethyl-thymidine
  modified_base 16: mod_base = OTHER; note = 2'-O-methoxyethyl-guanosine
ggctgtgaaactgatg

SEQ ID NO: 527 - RNA, 16 nt, synthetic construct
  source 1..16: mol_type = other RNA
  modified_base 1: mod_base = OTHER; note = 2'-O-methoxyethyl-guanosine
  modified_base 2: mod_base = OTHER; note = 2'-O-methoxyethyl-guanosine
  modified_base 3: mod_base = OTHER; note = 2'-O-methoxyethyl-guanosine
  modified_base 4: mod_base = OTHER; note = 2'-O-methoxyethyl-5'-methylcytidine
  modified_base 5: mod_base = OTHER; note = 2'-O-methoxyethyl-thymidine
  modified_base 6: mod_base = OTHER; note = 2'-O-methoxyethyl-guanosine
  modified_base 7: mod_base = OTHER; note = 2'-O-methoxyethyl-thymidine
  modified_base 8: mod_base = OTHER; note = 2'-O-methoxyethyl-guanosine
  modified_base 9: mod_base = OTHER; note = 2'-O-methoxyethyl-adenosine
  modified_base 10: mod_base = OTHER; note = 2'-O-methoxyethyl-adenosine
  modified_base 11: mod_base = OTHER; note = 2'-O-methoxyethyl-adenosine
  modified_base 12: mod_base = OTHER; note = 2'-O-methoxyethyl-5'-methylcytidine
  modified_base 13: mod_base = OTHER; note = 2'-O-methoxyethyl-thymidine
  modified_base 14: mod_base = OTHER; note = 2'-O-methoxyethyl-guanosine
  modified_base 15: mod_base = OTHER; note = 2'-O-methoxyethyl-adenosine
  modified_base 16: mod_base = OTHER; note = 2'-O-methoxyethyl-thymidine
gggctgtgaaactgat

SEQ ID NO: 528 - RNA, 15 nt, synthetic construct
  source 1..15: mol_type = other RNA
  modified_base 1: mod_base = OTHER; note = 2'-O-methoxyethyl-5'-methylcytidine
  modified_base 2: mod_base = OTHER; note = 2'-O-methoxyethyl-guanosine
  modified_base 3: mod_base = OTHER; note = 2'-O-methoxyethyl-guanosine
  modified_base 4: mod_base = OTHER; note = 2'-O-methoxyethyl-thymidine
  modified_base 5: mod_base = OTHER; note = 2'-O-methoxyethyl-5'-methylcytidine
  modified_base 6: mod_base = OTHER; note = 2'-O-methoxyethyl-5'-methylcytidine
  modified_base 7: mod_base = OTHER; note = 2'-O-methoxyethyl-adenosine
  modified_base 8: mod_base = OTHER; note = 2'-O-methoxyethyl-guanosine
  modified_base 9: mod_base = OTHER; note = 2'-O-methoxyethyl-guanosine
  modified_base 10: mod_base = OTHER; note = 2'-O-methoxyethyl-adenosine
  modified_base 11: mod_base = OTHER; note = 2'-O-methoxyethyl-adenosine
  modified_base 12: mod_base = OTHER; note = 2'-O-methoxyethyl-thymidine
  modified_base 13: mod_base = OTHER; note = 2'-O-methoxyethyl-guanosine
  modified_base 14: mod_base = OTHER; note = 2'-O-methoxyethyl-adenosine
  modified_base 15: mod_base = OTHER; note = 2'-O-methoxyethyl-5'-methylcytidine
cggtccaggaatgac

SEQ ID NO: 529 - RNA, 15 nt, synthetic construct
  source 1..15: mol_type = other RNA
  modified_base 1: mod_base = OTHER; note = 2'-O-methoxyethyl-5'-methylcytidine
  modified_base 2: mod_base = OTHER; note = 2'-O-methoxyethyl-5'-methylcytidine
  modified_base 3: mod_base = OTHER; note = 2'-O-methoxyethyl-guanosine
  modified_base 4: mod_base = OTHER; note = 2'-O-methoxyethyl-guanosine
  modified_base 5: mod_base = OTHER; note = 2'-O-methoxyethyl-thymidine
  modified_base 6: mod_base = OTHER; note = 2'-O-methoxyethyl-5'-methylcytidine
  modified_base 7: mod_base = OTHER; note = 2'-O-methoxyethyl-5'-methylcytidine
  modified_base 8: mod_base = OTHER; note = 2'-O-methoxyethyl-adenosine
  modified_base 9: mod_base = OTHER; note = 2'-O-methoxyethyl-guanosine
  modified_base 10: mod_base = OTHER; note = 2'-O-methoxyethyl-guanosine
  modified_base 11: mod_base = OTHER; note = 2'-O-methoxyethyl-adenosine
  modified_base 12: mod_base = OTHER; note = 2'-O-methoxyethyl-adenosine
  modified_base 13: mod_base = OTHER; note = 2'-O-methoxyethyl-thymidine
  modified_base 14: mod_base = OTHER; note = 2'-O-methoxyethyl-guanosine
  modified_base 15: mod_base = OTHER; note = 2'-O-methoxyethyl-adenosine
ccggtccaggaatga

SEQ ID NO: 530 - RNA, 15 nt, synthetic construct
  source 1..15: mol_type = other RNA
  modified_base 1: mod_base = OTHER; note = 2'-O-methoxyethyl-5'-methylcytidine
  modified_base 2: mod_base = OTHER; note = 2'-O-methoxyethyl-5'-methylcytidine
  modified_base 3: mod_base = OTHER; note = 2'-O-methoxyethyl-5'-methylcytidine
  modified_base 4: mod_base = OTHER; note = 2'-O-methoxyethyl-guanosine
  modified_base 5: mod_base = OTHER; note = 2'-O-methoxyethyl-guanosine
  modified_base 6: mod_base = OTHER; note = 2'-O-methoxyethyl-thymidine
  modified_base 7: mod_base = OTHER; note = 2'-O-methoxyethyl-5'-methylcytidine
  modified_base 8: mod_base = OTHER; note = 2'-O-methoxyethyl-5'-methylcytidine
  modified_base 9: mod_base = OTHER; note = 2'-O-methoxyethyl-adenosine
  modified_base 10: mod_base = OTHER; note = 2'-O-methoxyethyl-guanosine
  modified_base 11: mod_base = OTHER; note = 2'-O-methoxyethyl-guanosine
  modified_base 12: mod_base = OTHER; note = 2'-O-methoxyethyl-adenosine
  modified_base 13: mod_base = OTHER; note = 2'-O-methoxyethyl-adenosine
  modified_base 14: mod_base = OTHER; note = 2'-O-methoxyethyl-thymidine
  modified_base 15: mod_base = OTHER; note = 2'-O-methoxyethyl-guanosine
cccggtccaggaatg

SEQ ID NO: 531 - RNA, 15 nt, synthetic construct
  source 1..15: mol_type = other RNA
  modified_base 1: mod_base = OTHER; note = 2'-O-methoxyethyl-thymidine
  modified_base 2: mod_base = OTHER; note = 2'-O-methoxyethyl-5'-methylcytidine
  modified_base 3: mod_base = OTHER; note = 2'-O-methoxyethyl-5'-methylcytidine
  modified_base 4: mod_base = OTHER; note = 2'-O-methoxyethyl-5'-methylcytidine
  modified_base 5: mod_base = OTHER; note = 2'-O-methoxyethyl-guanosine
  modified_base 6: mod_base = OTHER; note = 2'-O-methoxyethyl-guanosine
  modified_base 7: mod_base = OTHER; note = 2'-O-methoxyethyl-thymidine
  modified_base 8: mod_base = OTHER; note = 2'-O-methoxyethyl-5'-methylcytidine
  modified_base 9: mod_base = OTHER; note = 2'-O-methoxyethyl-5'-methylcytidine
  modified_base 10: mod_base = OTHER; note = 2'-O-methoxyethyl-adenosine
  modified_base 11: mod_base = OTHER; note = 2'-O-methoxyethyl-guanosine
  modified_base 12: mod_base = OTHER; note = 2'-O-methoxyethyl-guanosine
  modified_base 13: mod_base = OTHER; note = 2'-O-methoxyethyl-adenosine
  modified_base 14: mod_base = OTHER; note = 2'-O-methoxyethyl-adenosine
  modified_base 15: mod_base = OTHER; note = 2'-O-methoxyethyl-thymidine
tcccggtccaggaat

SEQ ID NO: 532 - RNA, 15 nt, synthetic construct
  source 1..15: mol_type = other RNA
  modified_base 1: mod_base = OTHER; note = 2'-O-methoxyethyl-5'-methylcytidine
  modified_base 2: mod_base = OTHER; note = 2'-O-methoxyethyl-thymidine
  modified_base 3: mod_base = OTHER; note = 2'-O-methoxyethyl-5'-methylcytidine
  modified_base 4: mod_base = OTHER; note = 2'-O-methoxyethyl-5'-methylcytidine
  modified_base 5: mod_base = OTHER; note = 2'-O-methoxyethyl-5'-methylcytidine
  modified_base 6: mod_base = OTHER; note = 2'-O-methoxyethyl-guanosine
  modified_base 7: mod_base = OTHER; note = 2'-O-methoxyethyl-guanosine
  modified_base 8: mod_base = OTHER; note = 2'-O-methoxyethyl-thymidine
  modified_base 9: mod_base = OTHER; note = 2'-O-methoxyethyl-5'-methylcytidine
  modified_base 10: mod_base = OTHER; note = 2'-O-methoxyethyl-5'-methylcytidine
  modified_base 11: mod_base = OTHER; note = 2'-O-methoxyethyl-adenosine
  modified_base 12: mod_base = OTHER; note = 2'-O-methoxyethyl-guanosine
  modified_base 13: mod_base = OTHER; note = 2'-O-methoxyethyl-guanosine
  modified_base 14: mod_base = OTHER; note = 2'-O-methoxyethyl-adenosine
  modified_base 15: mod_base = OTHER; note = 2'-O-methoxyethyl-adenosine
ctcccggtccaggaa

SEQ ID NO: 533 - RNA, 15 nt, synthetic construct
  source 1..15: mol_type = other RNA
  modified_base 1: mod_base = OTHER; note = 2'-O-methoxyethyl-guanosine
  modified_base 2: mod_base = OTHER; note = 2'-O-methoxyethyl-5'-methylcytidine
  modified_base 3: mod_base = OTHER; note = 2'-O-methoxyethyl-thymidine
  modified_base 4: mod_base = OTHER; note = 2'-O-methoxyethyl-5'-methylcytidine
  modified_base 5: mod_base = OTHER; note = 2'-O-methoxyethyl-5'-methylcytidine
  modified_base 6: mod_base = OTHER; note = 2'-O-methoxyethyl-5'-methylcytidine
  modified_base 7: mod_base = OTHER; note = 2'-O-methoxyethyl-guanosine
  modified_base 8: mod_base = OTHER; note = 2'-O-methoxyethyl-guanosine
  modified_base 9: mod_base = OTHER; note = 2'-O-methoxyethyl-thymidine
  modified_base 10: mod_base = OTHER; note = 2'-O-methoxyethyl-5'-methylcytidine
  modified_base 11: mod_base = OTHER; note = 2'-O-methoxyethyl-5'-methylcytidine
  modified_base 12: mod_base = OTHER; note = 2'-O-methoxyethyl-adenosine
  modified_base 13: mod_base = OTHER; note = 2'-O-methoxyethyl-guanosine
  modified_base 14: mod_base = OTHER; note = 2'-O-methoxyethyl-guanosine
  modified_base 15: mod_base = OTHER; note = 2'-O-methoxyethyl-adenosine
gctcccggtccagga

SEQ ID NO: 534 - RNA, 15 nt, synthetic construct
  source 1..15: mol_type = other RNA
  modified_base 1: mod_base = OTHER; note = 2'-O-methoxyethyl-guanosine
  modified_base 2: mod_base = OTHER; note = 2'-O-methoxyethyl-guanosine
  modified_base 3: mod_base = OTHER; note = 2'-O-methoxyethyl-5'-methylcytidine
  modified_base 4: mod_base = OTHER; note = 2'-O-methoxyethyl-thymidine
  modified_base 5: mod_base = OTHER; note = 2'-O-methoxyethyl-5'-methylcytidine
  modified_base 6: mod_base = OTHER; note = 2'-O-methoxyethyl-5'-methylcytidine
  modified_base 7: mod_base = OTHER; note = 2'-O-methoxyethyl-5'-methylcytidine
  modified_base 8: mod_base = OTHER; note = 2'-O-methoxyethyl-guanosine
  modified_base 9: mod_base = OTHER; note = 2'-O-methoxyethyl-guanosine
  modified_base 10: mod_base = OTHER; note = 2'-O-methoxyethyl-thymidine
  modified_base 11: mod_base = OTHER; note = 2'-O-methoxyethyl-5'-methylcytidine
  modified_base 12: mod_base = OTHER; note = 2'-O-methoxyethyl-5'-methylcytidine
  modified_base 13: mod_base = OTHER; note = 2'-O-methoxyethyl-adenosine
  modified_base 14: mod_base = OTHER; note = 2'-O-methoxyethyl-guanosine
  modified_base 15: mod_base = OTHER; note = 2'-O-methoxyethyl-guanosine
ggctcccggtccagg

SEQ ID NO: 535 - RNA, 15 nt, synthetic construct
  source 1..15: mol_type = other RNA
  modified_base 1: mod_base = OTHER; note = 2'-O-methoxyethyl-5'-methylcytidine
  modified_base 2: mod_base = OTHER; note = 2'-O-methoxyethyl-guanosine
  modified_base 3: mod_base = OTHER; note = 2'-O-methoxyethyl-guanosine
  modified_base 4: mod_base = OTHER; note = 2'-O-methoxyethyl-guanosine
  modified_base 5: mod_base = OTHER; note = 2'-O-methoxyethyl-adenosine
  modified_base 6: mod_base = OTHER; note = 2'-O-methoxyethyl-guanosine
  modified_base 7: mod_base = OTHER; note = 2'-O-methoxyethyl-5'-methylcytidine
  modified_base 8: mod_base = OTHER; note = 2'-O-methoxyethyl-5'-methylcytidine
  modified_base 9: mod_base = OTHER; note = 2'-O-methoxyethyl-5'-methylcytidine
  modified_base 10: mod_base = OTHER; note = 2'-O-methoxyethyl-5'-methylcytidine
  modified_base 11: mod_base = OTHER; note = 2'-O-methoxyethyl-5'-methylcytidine
  modified_base 12: mod_base = OTHER; note = 2'-O-methoxyethyl-guanosine
  modified_base 13: mod_base = OTHER; note = 2'-O-methoxyethyl-thymidine
  modified_base 14: mod_base = OTHER; note = 2'-O-methoxyethyl-guanosine
  modified_base 15: mod_base = OTHER; note = 2'-O-methoxyethyl-thymidine
cgggagcccccgtgt

SEQ ID NO: 536 - RNA, 15 nt, synthetic construct
  source 1..15: mol_type = other RNA
  modified_base 1: mod_base = OTHER; note = 2'-O-methoxyethyl-guanosine
  modified_base 2: mod_base = OTHER; note = 2'-O-methoxyethyl-5'-methylcytidine
  modified_base 3: mod_base = OTHER; note = 2'-O-methoxyethyl-guanosine
  modified_base 4: mod_base = OTHER; note = 2'-O-methoxyethyl-guanosine
  modified_base 5: mod_base = OTHER; note = 2'-O-methoxyethyl-guanosine
  modified_base 6: mod_base = OTHER; note = 2'-O-methoxyethyl-adenosine
  modified_base 7: mod_base = OTHER; note = 2'-O-methoxyethyl-guanosine
  modified_base 8: mod_base = OTHER; note = 2'-O-methoxyethyl-5'-methylcytidine
  modified_base 9: mod_base = OTHER; note = 2'-O-methoxyethyl-5'-methylcytidine
  modified_base 10: mod_base = OTHER; note = 2'-O-methoxyethyl-5'-methylcytidine
  modified_base 11: mod_base = OTHER; note = 2'-O-methoxyethyl-5'-methylcytidine
  modified_base 12: mod_base = OTHER; note = 2'-O-methoxyethyl-5'-methylcytidine
  modified_base 13: mod_base = OTHER; note = 2'-O-methoxyethyl-guanosine
  modified_base 14: mod_base = OTHER; note = 2'-O-methoxyethyl-thymidine
  modified_base 15: mod_base = OTHER; note = 2'-O-methoxyethyl-guanosine
gcgggagcccccgtg

SEQ ID NO: 537 - RNA, 15 nt, synthetic construct
  source 1..15: mol_type = other RNA
  modified_base 1: mod_base = OTHER; note = 2'-O-methoxyethyl-5'-methylcytidine
  modified_base 2: mod_base = OTHER; note = 2'-O-methoxyethyl-guanosine
  modified_base 3: mod_base = OTHER; note = 2'-O-methoxyethyl-5'-methylcytidine
  modified_base 4: mod_base = OTHER; note = 2'-O-methoxyethyl-guanosine
  modified_base 5: mod_base = OTHER; note = 2'-O-methoxyethyl-guanosine
  modified_base 6: mod_base = OTHER; note = 2'-O-methoxyethyl-guanosine
  modified_base 7: mod_base = OTHER; note = 2'-O-methoxyethyl-adenosine
  modified_base 8: mod_base = OTHER; note = 2'-O-methoxyethyl-guanosine
  modified_base 9: mod_base = OTHER; note = 2'-O-methoxyethyl-5'-methylcytidine
  modified_base 10: mod_base = OTHER; note = 2'-O-methoxyethyl-5'-methylcytidine
  modified_base 11: mod_base = OTHER; note = 2'-O-methoxyethyl-5'-methylcytidine
  modified_base 12: mod_base = OTHER; note = 2'-O-methoxyethyl-5'-methylcytidine
  modified_base 13: mod_base = OTHER; note = 2'-O-methoxyethyl-5'-methylcytidine
  modified_base 14: mod_base = OTHER; note = 2'-O-methoxyethyl-guanosine
  modified_base 15: mod_base = OTHER; note = 2'-O-methoxyethyl-thymidine
cgcgggagcccccgt

SEQ ID NO: 538 - RNA, 15 nt, synthetic construct
  source 1..15: mol_type = other RNA
  modified_base 1: mod_base = OTHER; note = 2'-O-methoxyethyl-adenosine
  modified_base 2: mod_base = OTHER; note = 2'-O-methoxyethyl-5'-methylcytidine
  modified_base 3: mod_base = OTHER; note = 2'-O-methoxyethyl-guanosine
  modified_base 4: mod_base = OTHER; note = 2'-O-methoxyethyl-5'-methylcytidine
  modified_base 5: mod_base = OTHER; note = 2'-O-methoxyethyl-guanosine
  modified_base 6: mod_base = OTHER; note = 2'-O-methoxyethyl-guanosine
  modified_base 7: mod_base = OTHER; note = 2'-O-methoxyethyl-guanosine
  modified_base 8: mod_base = OTHER; note = 2'-O-methoxyethyl-adenosine
  modified_base 9: mod_base = OTHER; note = 2'-O-methoxyethyl-guanosine
  modified_base 10: mod_base = OTHER; note = 2'-O-methoxyethyl-5'-methylcytidine
  modified_base 11: mod_base = OTHER; note = 2'-O-methoxyethyl-5'-methylcytidine
  modified_base 12: mod_base = OTHER; note = 2'-O-methoxyethyl-5'-methylcytidine
  modified_base 13: mod_base = OTHER; note = 2'-O-methoxyethyl-5'-methylcytidine
  modified_base 14: mod_base = OTHER; note = 2'-O-methoxyethyl-5'-methylcytidine
  modified_base 15: mod_base = OTHER; note = 2'-O-methoxyethyl-guanosine
acgcgggagcccccg

SEQ ID NO: 539 - RNA, 15 nt, synthetic construct
  source 1..15: mol_type = other RNA
  modified_base 1: mod_base = OTHER; note = 2'-O-methoxyethyl-5'-methylcytidine
  modified_base 2: mod_base = OTHER; note = 2'-O-methoxyethyl-adenosine
  modified_base 3: mod_base = OTHER; note = 2'-O-methoxyethyl-5'-methylcytidine
  modified_base 4: mod_base = OTHER; note = 2'-O-methoxyethyl-guanosine
  modified_base 5: mod_base = OTHER; note = 2'-O-methoxyethyl-5'-methylcytidine
  modified_base 6: mod_base = OTHER; note = 2'-O-methoxyethyl-guanosine
  modified_base 7: mod_base = OTHER; note = 2'-O-methoxyethyl-guanosine
  modified_base 8: mod_base = OTHER; note = 2'-O-methoxyethyl-guanosine
  modified_base 9: mod_base = OTHER; note = 2'-O-methoxyethyl-adenosine
  modified_base 10: mod_base = OTHER; note = 2'-O-methoxyethyl-guanosine
  modified_base 11: mod_base = OTHER; note = 2'-O-methoxyethyl-5'-methylcytidine
  modified_base 12: mod_base = OTHER; note = 2'-O-methoxyethyl-5'-methylcytidine
  modified_base 13: mod_base = OTHER; note = 2'-O-methoxyethyl-5'-methylcytidine
  modified_base 14: mod_base = OTHER; note = 2'-O-methoxyethyl-5'-methylcytidine
  modified_base 15: mod_base = OTHER; note = 2'-O-methoxyethyl-5'-methylcytidine
cacgcgggagccccc

SEQ ID NO: 540 - RNA, 15 nt, synthetic construct
  source 1..15: mol_type = other RNA
  modified_base 1: mod_base = OTHER; note = 2'-O-methoxyethyl-5'-methylcytidine
  modified_base 2: mod_base = OTHER; note = 2'-O-methoxyethyl-5'-methylcytidine
  modified_base 3: mod_base = OTHER; note = 2'-O-methoxyethyl-adenosine
  modified_base 4: mod_base = OTHER; note = 2'-O-methoxyethyl-5'-methylcytidine
  modified_base 5: mod_base = OTHER; note = 2'-O-methoxyethyl-guanosine
  modified_base 6: mod_base = OTHER; note = 2'-O-methoxyethyl-5'-methylcytidine
  modified_base 7: mod_base = OTHER; note = 2'-O-methoxyethyl-guanosine
  modified_base 8: mod_base = OTHER; note = 2'-O-methoxyethyl-guanosine
  modified_base 9: mod_base = OTHER; note = 2'-O-methoxyethyl-guanosine
  modified_base 10: mod_base = OTHER; note = 2'-O-methoxyethyl-adenosine
  modified_base 11: mod_base = OTHER; note = 2'-O-methoxyethyl-guanosine
  modified_base 12: mod_base = OTHER; note = 2'-O-methoxyethyl-5'-methylcytidine
  modified_base 13: mod_base = OTHER; note = 2'-O-methoxyethyl-5'-methylcytidine
  modified_base 14: mod_base = OTHER; note = 2'-O-methoxyethyl-5'-methylcytidine
  modified_base 15: mod_base = OTHER; note = 2'-O-methoxyethyl-5'-methylcytidine
ccacgcgggagcccc

SEQ ID NO: 541 - RNA, 15 nt, synthetic construct
  source 1..15: mol_type = other RNA
  modified_base 1: mod_base = OTHER; note = 2'-O-methoxyethyl-guanosine
  modified_base 2: mod_base = OTHER; note = 2'-O-methoxyethyl-5'-methylcytidine
  modified_base 3: mod_base = OTHER; note = 2'-O-methoxyethyl-5'-methylcytidine
  modified_base 4: mod_base = OTHER; note = 2'-O-methoxyethyl-adenosine
  modified_base 5: mod_base = OTHER; note = 2'-O-methoxyethyl-5'-methylcytidine
  modified_base 6: mod_base = OTHER; note = 2'-O-methoxyethyl-guanosine
  modified_base 7: mod_base = OTHER; note = 2'-O-methoxyethyl-5'-methylcytidine
  modified_base 8: mod_base = OTHER; note = 2'-O-methoxyethyl-guanosine
  modified_base 9: mod_base = OTHER; note = 2'-O-methoxyethyl-guanosine
  modified_base 10: mod_base = OTHER; note = 2'-O-methoxyethyl-guanosine
  modified_base 11: mod_base = OTHER; note = 2'-O-methoxyethyl-adenosine
  modified_base 12: mod_base = OTHER; note = 2'-O-methoxyethyl-guanosine
  modified_base 13: mod_base = OTHER; note = 2'-O-methoxyethyl-5'-methylcytidine
  modified_base 14: mod_base = OTHER; note = 2'-O-methoxyethyl-5'-methylcytidine
  modified_base 15: mod_base = OTHER; note = 2'-O-methoxyethyl-5'-methylcytidine
gccacgcgggagccc

SEQ ID NO: 542 - RNA, 15 nt, synthetic construct
  source 1..15: mol_type = other RNA
  modified_base 1: mod_base = OTHER; note = 2'-O-methoxyethyl-guanosine
  modified_base 2: mod_base = OTHER; note = 2'-O-methoxyethyl-guanosine
  modified_base 3: mod_base = OTHER; note = 2'-O-methoxyethyl-5'-methylcytidine
  modified_base 4: mod_base = OTHER; note = 2'-O-methoxyethyl-5'-methylcytidine
  modified_base 5: mod_base = OTHER; note = 2'-O-methoxyethyl-adenosine
  modified_base 6: mod_base = OTHER; note = 2'-O-methoxyethyl-5'-methylcytidine
  modified_base 7: mod_base = OTHER; note = 2'-O-methoxyethyl-guanosine
  modified_base 8: mod_base = OTHER; note = 2'-O-methoxyethyl-5'-methylcytidine
  modified_base 9: mod_base = OTHER; note = 2'-O-methoxyethyl-guanosine
  modified_base 10: mod_base = OTHER; note = 2'-O-methoxyethyl-guanosine
  modified_base 11: mod_base = OTHER; note = 2'-O-methoxyethyl-guanosine
  modified_base 12: mod_base = OTHER; note = 2'-O-methoxyethyl-adenosine
  modified_base 13: mod_base = OTHER; note = 2'-O-methoxyethyl-guanosine
  modified_base 14: mod_base = OTHER; note = 2'-O-methoxyethyl-5'-methylcytidine
  modified_base 15: mod_base = OTHER; note = 2'-O-methoxyethyl-5'-methylcytidine
ggccacgcgggagcc

SEQ ID NO: 543 - RNA, 15 nt, synthetic construct
  source 1..15: mol_type = other RNA
  modified_base 1: mod_base = OTHER; note = 2'-O-methoxyethyl-5'-methylcytidine
  modified_base 2: mod_base = OTHER; note = 2'-O-methoxyethyl-guanosine
  modified_base 3: mod_base = OTHER; note = 2'-O-methoxyethyl-guanosine
  modified_base 4: mod_base = OTHER; note = 2'-O-methoxyethyl-5'-methylcytidine
  modified_base 5: mod_base = OTHER; note = 2'-O-methoxyethyl-5'-methylcytidine
  modified_base 6: mod_base = OTHER; note = 2'-O-methoxyethyl-adenosine
  modified_base 7: mod_base = OTHER; note = 2'-O-methoxyethyl-5'-methylcytidine
  modified_base 8: mod_base = OTHER; note = 2'-O-methoxyethyl-guanosine
  modified_base 9: mod_base = OTHER; note = 2'-O-methoxyethyl-5'-methylcytidine
  modified_base 10: mod_base = OTHER; note = 2'-O-methoxyethyl-guanosine
  modified_base 11: mod_base = OTHER; note = 2'-O-methoxyethyl-guanosine
  modified_base 12: mod_base = OTHER; note = 2'-O-methoxyethyl-guanosine
  modified_base 13: mod_base = OTHER; note = 2'-O-methoxyethyl-adenosine
  modified_base 14: mod_base = OTHER; note = 2'-O-methoxyethyl-guanosine
  modified_base 15: mod_base = OTHER; note = 2'-O-methoxyethyl-5'-methylcytidine
cggccacgcgggagc

SEQ ID NO: 544 - RNA, 15 nt, synthetic construct
  source 1..15: mol_type = other RNA
  modified_base 1: mod_base = OTHER; note = 2'-O-methoxyethyl-adenosine
  modified_base 2: mod_base = OTHER; note = 2'-O-methoxyethyl-5'-methylcytidine
  modified_base 3: mod_base = OTHER; note = 2'-O-methoxyethyl-guanosine
  modified_base 4: mod_base = OTHER; note = 2'-O-methoxyethyl-guanosine
  modified_base 5: mod_base = OTHER; note = 2'-O-methoxyethyl-5'-methylcytidine
  modified_base 6: mod_base = OTHER; note = 2'-O-methoxyethyl-5'-methylcytidine
  modified_base 7: mod_base = OTHER; note = 2'-O-methoxyethyl-adenosine
  modified_base 8: mod_base = OTHER; note = 2'-O-methoxyethyl-5'-methylcytidine
  modified_base 9: mod_base = OTHER; note = 2'-O-methoxyethyl-guanosine
  modified_base 10: mod_base = OTHER; note = 2'-O-methoxyethyl-5'-methylcytidine
  modified_base 11: mod_base = OTHER; note = 2'-O-methoxyethyl-guanosine
  modified_base 12: mod_base = OTHER; note = 2'-O-methoxyethyl-guanosine
  modified_base 13: mod_base = OTHER; note = 2'-O-methoxyethyl-guanosine
  modified_base 14: mod_base = OTHER; note = 2'-O-methoxyethyl-adenosine
  modified_base 15: mod_base = OTHER; note = 2'-O-methoxyethyl-guanosine
acggccacgcgggag

SEQ ID NO: 545 - RNA, 15 nt, synthetic construct
  source 1..15: mol_type = other RNA
  modified_base 1: mod_base = OTHER; note = 2'-O-methoxyethyl-guanosine
  modified_base 2: mod_base = OTHER; note = 2'-O-methoxyethyl-adenosine
  modified_base 3: mod_base = OTHER; note = 2'-O-methoxyethyl-5'-methylcytidine
  modified_base 4: mod_base = OTHER; note = 2'-O-methoxyethyl-guanosine
  modified_base 5: mod_base = OTHER; note = 2'-O-methoxyethyl-guanosine
  modified_base 6: mod_base = OTHER; note = 2'-O-methoxyethyl-5'-methylcytidine
  modified_base 7: mod_base = OTHER; note = 2'-O-methoxyethyl-5'-methylcytidine
  modified_base 8: mod_base = OTHER; note = 2'-O-methoxyethyl-adenosine
  modified_base 9: mod_base = OTHER; note = 2'-O-methoxyethyl-5'-methylcytidine
  modified_base 10: mod_base = OTHER; note = 2'-O-methoxyethyl-guanosine
  modified_base 11: mod_base = OTHER; note = 2'-O-methoxyethyl-5'-methylcytidine
  modified_base 12: mod_base = OTHER; note = 2'-O-methoxyethyl-guanosine
  modified_base 13: mod_base = OTHER; note = 2'-O-methoxyethyl-guanosine
  modified_base 14: mod_base = OTHER; note = 2'-O-methoxyethyl-guanosine
  modified_base 15: mod_base = OTHER; note = 2'-O-methoxyethyl-adenosine
gacggccacgcggga

SEQ ID NO: 546 - RNA, 15 nt, synthetic construct
  source 1..15: mol_type = other RNA
  modified_base 1: mod_base = OTHER; note = 2'-O-methoxyethyl-adenosine
  modified_base 2: mod_base = OTHER; note = 2'-O-methoxyethyl-guanosine
  modified_base 3: mod_base = OTHER; note = 2'-O-methoxyethyl-adenosine
  modified_base 4: mod_base = OTHER; note = 2'-O-methoxyethyl-5'-methylcytidine
  modified_base 5: mod_base = OTHER; note = 2'-O-methoxyethyl-guanosine
  modified_base 6: mod_base = OTHER; note = 2'-O-methoxyethyl-guanosine
  modified_base 7: mod_base = OTHER; note = 2'-O-methoxyethyl-5'-methylcytidine
  modified_base 8: mod_base = OTHER; note = 2'-O-methoxyethyl-5'-methylcytidine
  modified_base 9: mod_base = OTHER; note = 2'-O-methoxyethyl-adenosine
  modified_base 10: mod_base = OTHER; note = 2'-O-methoxyethyl-5'-methylcytidine
  modified_base 11: mod_base = OTHER; note = 2'-O-methoxyethyl-guanosine
  modified_base 12: mod_base = OTHER; note = 2'-O-methoxyethyl-5'-methylcytidine
  modified_base 13: mod_base = OTHER; note = 2'-O-methoxyethyl-guanosine
  modified_base 14: mod_base = OTHER; note = 2'-O-methoxyethyl-guanosine
  modified_base 15: mod_base = OTHER; note = 2'-O-methoxyethyl-guanosine
agacggccacgcggg

SEQ ID NO: 547 - RNA, 18 nt, synthetic construct
  source 1..18: mol_type = other RNA
  modified_base 1: mod_base = OTHER; note = 2'-O-methoxyethyl-guanosine
  modified_base 2: mod_base = OTHER; note = 2'-O-methoxyethyl-5'-methylcytidine
  modified_base 3: mod_base = OTHER; note = 2'-O-methoxyethyl-thymidine
  modified_base 4: mod_base = OTHER; note = 2'-O-methoxyethyl-adenosine
  modified_base 5: mod_base = OTHER; note = 2'-O-methoxyethyl-guanosine
  modified_base 6: mod_base = OTHER; note = 2'-O-methoxyethyl-guanosine
  modified_base 7: mod_base = OTHER; note = 2'-O-methoxyethyl-guanosine
  modified_base 8: mod_base = OTHER; note = 2'-O-methoxyethyl-adenosine
  modified_base 9: mod_base = OTHER; note = 2'-O-methoxyethyl-guanosine
  modified_base 10: mod_base = OTHER; note = 2'-O-methoxyethyl-guanosine
  modified_base 11: mod_base = OTHER; note = 2'-O-methoxyethyl-guanosine
  modified_base 12: mod_base = OTHER; note = 2'-O-methoxyethyl-adenosine
  modified_base 13: mod_base = OTHER; note = 2'-O-methoxyethyl-thymidine
  modified_base 14: mod_base = OTHER; note = 2'-O-methoxyethyl-guanosine
  modified_base 15: mod_base = OTHER; note = 2'-O-methoxyethyl-guanosine
  modified_base 16: mod_base = OTHER; note = 2'-O-methoxyethyl-thymidine
  modified_base 17: mod_base = OTHER; note = 2'-O-methoxyethyl-thymidine
  modified_base 18: mod_base = OTHER; note = 2'-O-methoxyethyl-adenosine
gctagggagggatggtta

SEQ ID NO: 548 - RNA, 18 nt, synthetic construct
  source 1..18: mol_type = other RNA
  modified_base 1: mod_base = OTHER; note = 2'-O-methoxyethyl-thymidine
  modified_base 2: mod_base = OTHER; note = 2'-O-methoxyethyl-guanosine
  modified_base 3: mod_base = OTHER; note = 2'-O-methoxyethyl-thymidine
  modified_base 4: mod_base = OTHER; note = 2'-O-methoxyethyl-adenosine
  modified_base 5: mod_base = OTHER; note = 2'-O-methoxyethyl-adenosine
  modified_base 6: mod_base = OTHER; note = 2'-O-methoxyethyl-guanosine
  modified_base 7: mod_base = OTHER; note = 2'-O-methoxyethyl-5'-methylcytidine
  modified_base 8: mod_base = OTHER; note = 2'-O-methoxyethyl-thymidine
  modified_base 9: mod_base = OTHER; note = 2'-O-methoxyethyl-adenosine
  modified_base 10: mod_base = OTHER; note = 2'-O-methoxyethyl-guanosine
  modified_base 11: mod_base = OTHER; note = 2'-O-methoxyethyl-guanosine
  modified_base 12: mod_base = OTHER; note = 2'-O-methoxyethyl-guanosine
  modified_base 13: mod_base = OTHER; note = 2'-O-methoxyethyl-adenosine
  modified_base 14: mod_base = OTHER; note = 2'-O-methoxyethyl-guanosine
  modified_base 15: mod_base = OTHER; note = 2'-O-methoxyethyl-guanosine
  modified_base 16: mod_base = OTHER; note = 2'-O-methoxyethyl-guanosine
  modified_base 17: mod_base = OTHER; note = 2'-O-methoxyethyl-adenosine
  modified_base 18: mod_base = OTHER; note = 2'-O-methoxyethyl-thymidine
tgtaagctagggagggat

SEQ ID NO: 549 - RNA, 18 nt, synthetic construct
  source 1..18: mol_type = other RNA
  modified_base 1: mod_base = OTHER; note = 2'-O-methoxyethyl-adenosine
  modified_base 2: mod_base = OTHER; note = 2'-O-methoxyethyl-5'-methylcytidine
  modified_base 3: mod_base = OTHER; note = 2'-O-methoxyethyl-adenosine
  modified_base 4: mod_base = OTHER; note = 2'-O-methoxyethyl-guanosine
  modified_base 5: mod_base = OTHER; note = 2'-O-methoxyethyl-adenosine
  modified_base 6: mod_base = OTHER; note = 2'-O-methoxyethyl-thymidine
  modified_base 7: mod_base = OTHER; note = 2'-O-methoxyethyl-guanosine
  modified_base 8: mod_base = OTHER; note = 2'-O-methoxyethyl-thymidine
  modified_base 9: mod_base = OTHER; note = 2'-O-methoxyethyl-adenosine
  modified_base 10: mod_base = OTHER; note = 2'-O-methoxyethyl-adenosine
  modified_base 11: mod_base = OTHER; note = 2'-O-methoxyethyl-guanosine
  modified_base 12: mod_base = OTHER; note = 2'-O-methoxyethyl-5'-methylcytidine
  modified_base 13: mod_base = OTHER; note = 2'-O-methoxyethyl-thymidine
  modified_base 14: mod_base = OTHER; note = 2'-O-methoxyethyl-adenosine
  modified_base 15: mod_base = OTHER; note = 2'-O-methoxyethyl-guanosine
  modified_base 16: mod_base = OTHER; note = 2'-O-methoxyethyl-guanosine
  modified_base 17: mod_base = OTHER; note = 2'-O-methoxyethyl-guanosine
  modified_base 18: mod_base = OTHER; note = 2'-O-methoxyethyl-adenosine
acagatgtaagctaggga

SEQ ID NO: 550 - RNA, 18 nt, synthetic construct
  source 1..18: mol_type = other RNA
  modified_base 1: mod_base = OTHER; note = 2'-O-methoxyethyl-adenosine
  modified_base 2: mod_base = OTHER; note = 2'-O-methoxyethyl-adenosine
  modified_base 3: mod_base = OTHER; note = 2'-O-methoxyethyl-guanosine
  modified_base 4: mod_base = OTHER; note = 2'-O-methoxyethyl-guanosine
  modified_base 5: mod_base = OTHER; note = 2'-O-methoxyethyl-adenosine
  modified_base 6: mod_base = OTHER; note = 2'-O-methoxyethyl-adenosine
  modified_base 7: mod_base = OTHER; note = 2'-O-methoxyethyl-5'-methylcytidine
  modified_base 8: mod_base = OTHER; note = 2'-O-methoxyethyl-adenosine
  modified_base 9: mod_base = OTHER; note = 2'-O-methoxyethyl-guanosine
  modified_base 10: mod_base = OTHER; note = 2'-O-methoxyethyl-adenosine
  modified_base 11: mod_base = OTHER; note = 2'-O-methoxyethyl-thymidine
  modified_base 12: mod_base = OTHER; note = 2'-O-methoxyethyl-guanosine
  modified_base 13: mod_base = OTHER; note = 2'-O-methoxyethyl-thymidine
  modified_base 14: mod_base = OTHER; note = 2'-O-methoxyethyl-adenosine
  modified_base 15: mod_base = OTHER; note = 2'-O-methoxyethyl-adenosine
  modified_base 16: mod_base = OTHER; note = 2'-O-methoxyethyl-guanosine
  modified_base 17: mod_base = OTHER; note = 2'-O-methoxyethyl-5'-methylcytidine
  modified_base 18: mod_base = OTHER; note = 2'-O-methoxyethyl-thymidine
aaggaacagatgtaagct

SEQ ID NO: 551 - RNA, 18 nt, synthetic construct
  source 1..18: mol_type = other RNA
  modified_base 1: mod_base = OTHER; note = 2'-O-methoxyethyl-5'-methylcytidine
  modified_base 2: mod_base = OTHER; note = 2'-O-methoxyethyl-adenosine
  modified_base 3: mod_base = OTHER; note = 2'-O-methoxyethyl-adenosine
  modified_base 4: mod_base = OTHER; note = 2'-O-methoxyethyl-5'-methylcytidine
  modified_base 5: mod_base = OTHER; note = 2'-O-methoxyethyl-adenosine
  modified_base 6: mod_base = OTHER; note = 2'-O-methoxyethyl-adenosine
  modified_base 7: mod_base = OTHER; note = 2'-O-methoxyethyl-adenosine
  modified_base 8: mod_base = OTHER; note = 2'-O-methoxyethyl-guanosine
  modified_base 9: mod_base = OTHER; note = 2'-O-methoxyethyl-guanosine
  modified_base 10: mod_base = OTHER; note = 2'-O-methoxyethyl-adenosine
  modified_base 11: mod_base = OTHER; note = 2'-O-methoxyethyl-adenosine
  modified_base 12: mod_base = OTHER; note = 2'-O-methoxyethyl-5'-methylcytidine
  modified_base 13: mod_base = OTHER; note = 2'-O-methoxyethyl-adenosine
  modified_base 14: mod_base = OTHER; note = 2'-O-methoxyethyl-guanosine
  modified_base 15: mod_base = OTHER; note = 2'-O-methoxyethyl-adenosine
  modified_base 16: mod_base = OTHER; note = 2'-O-methoxyethyl-thymidine
  modified_base 17: mod_base = OTHER; note = 2'-O-methoxyethyl-guanosine
  modified_base 18: mod_base = OTHER; note = 2'-O-methoxyethyl-thymidine
caacaaaggaacagatgt

SEQ ID NO: 552 - RNA, 18 nt, synthetic construct
  source 1..18: mol_type = other RNA
  modified_base 1: mod_base = OTHER; note = 2'-O-methoxyethyl-guanosine
  modified_base 2: mod_base = OTHER; note = 2'-O-methoxyethyl-guanosine
  modified_base 3: mod_base = OTHER; note = 2'-O-methoxyethyl-guanosine
  modified_base 4: mod_base = OTHER; note = 2'-O-methoxyethyl-thymidine
  modified_base 5: mod_base = OTHER; note = 2'-O-methoxyethyl-guanosine
  modified_base 6: mod_base = OTHER; note = 2'-O-methoxyethyl-5'-methylcytidine
  modified_base 7: mod_base = OTHER; note = 2'-O-methoxyethyl-adenosine
  modified_base 8: mod_base = OTHER; note = 2'-O-methoxyethyl-adenosine
  modified_base 9: mod_base = OTHER; note = 2'-O-methoxyethyl-5'-methylcytidine
  modified_base 10: mod_base = OTHER; note = 2'-O-methoxyethyl-adenosine
  modified_base 11: mod_base = OTHER; note = 2'-O-methoxyethyl-adenosine
  modified_base 12: mod_base = OTHER; note = 2'-O-methoxyethyl-adenosine
  modified_base 13: mod_base = OTHER; note = 2'-O-methoxyethyl-guanosine
  modified_base 14: mod_base = OTHER; note = 2'-O-methoxyethyl-guanosine
  modified_base 15: mod_base = OTHER; note = 2'-O-methoxyethyl-adenosine
  modified_base 16: mod_base = OTHER; note = 2'-O-methoxyethyl-adenosine
  modified_base 17: mod_base = OTHER; note = 2'-O-methoxyethyl-5'-methylcytidine
  modified_base 18: mod_base = OTHER; note = 2'-O-methoxyethyl-adenosine
gggtgcaacaaaggaaca

SEQ ID NO: 553 - RNA, 18 nt, synthetic construct
  source 1..18: mol_type = other RNA
  modified_base 1: mod_base = OTHER; note = 2'-O-methoxyethyl-adenosine
  modified_base 2: mod_base = OTHER; note = 2'-O-methoxyethyl-5'-methylcytidine
  modified_base 3: mod_base = OTHER; note = 2'-O-methoxyethyl-5'-methylcytidine
  modified_base 4: mod_base = OTHER; note = 2'-O-methoxyethyl-adenosine
  modified_base 5: mod_base = OTHER; note = 2'-O-methoxyethyl-adenosine
  modified_base 6: mod_base = OTHER; note = 2'-O-methoxyethyl-guanosine
  modified_base 7: mod_base = OTHER; note = 2'-O-methoxyethyl-guanosine
  modified_base 8: mod_base = OTHER; note = 2'-O-methoxyethyl-guanosine
  modified_base 9: mod_base = OTHER; note = 2'-O-methoxyethyl-thymidine
  modified_base 10: mod_base = OTHER; note = 2'-O-methoxyethyl-guanosine
  modified_base 11: mod_base = OTHER; note = 2'-O-methoxyethyl-5'-methylcytidine
  modified_base 12: mod_base = OTHER; note = 2'-O-methoxyethyl-adenosine
  modified_base 13: mod_base = OTHER; note = 2'-O-methoxyethyl-adenosine
  modified_base 14: mod_base = OTHER; note = 2'-O-methoxyethyl-5'-methylcytidine
  modified_base 15: mod_base = OTHER; note = 2'-O-methoxyethyl-adenosine
  modified_base 16: mod_base = OTHER; note = 2'-O-methoxyethyl-adenosine
  modified_base 17: mod_base = OTHER; note = 2'-O-methoxyethyl-adenosine
  modified_base 18: mod_base = OTHER; note = 2'-O-methoxyethyl-guanosine
accaagggtgcaacaaag

SEQ ID NO: 554 - RNA, 18 nt, synthetic construct
  source 1..18: mol_type = other RNA
  modified_base 1: mod_base = OTHER; note = 2'-O-methoxyethyl-guanosine
  modified_base 2: mod_base = OTHER; note = 2'-O-methoxyethyl-thymidine
  modified_base 3: mod_base = OTHER; note = 2'-O-methoxyethyl-thymidine
  modified_base 4: mod_base = OTHER; note = 2'-O-methoxyethyl-adenosine
  modified_base 5: mod_base = OTHER; note = 2'-O-methoxyethyl-adenosine
  modified_base 6: mod_base = OTHER; note = 2'-O-methoxyethyl-adenosine
  modified_base 7: mod_base = OTHER; note = 2'-O-methoxyethyl-5'-methylcytidine
  modified_base 8: mod_base = OTHER; note = 2'-O-methoxyethyl-5'-methylcytidine
  modified_base 9: mod_base = OTHER; note = 2'-O-methoxyethyl-adenosine
  modified_base 10: mod_base = OTHER; note = 2'-O-methoxyethyl-adenosine
  modified_base 11: mod_base = OTHER; note = 2'-O-methoxyethyl-guanosine
  modified_base 12: mod_base = OTHER; note = 2'-O-methoxyethyl-guanosine
  modified_base 13: mod_base = OTHER; note = 2'-O-methoxyethyl-guanosine
  modified_base 14: mod_base = OTHER; note = 2'-O-methoxyethyl-thymidine
  modified_base 15: mod_base = OTHER; note = 2'-O-methoxyethyl-guanosine
  modified_base 16: mod_base = OTHER; note = 2'-O-methoxyethyl-5'-methylcytidine
  modified_base 17: mod_base = OTHER; note = 2'-O-methoxyethyl-adenosine
  modified_base 18: mod_base = OTHER; note = 2'-O-methoxyethyl-adenosine
gttaaaccaagggtgcaa

SEQ ID NO: 555 - RNA, 18 nt, synthetic construct
  source 1..18: mol_type = other RNA
  modified_base 1: mod_base = OTHER; note = 2'-O-methoxyethyl-adenosine
  modified_base 2: mod_base = OTHER; note = 2'-O-methoxyethyl-thymidine
  modified_base 3: mod_base = OTHER; note = 2'-O-methoxyethyl-adenosine
  modified_base 4: mod_base = OTHER; note = 2'-O-methoxyethyl-adenosine
  modified_base 5: mod_base = OTHER; note = 2'-O-methoxyethyl-thymidine
  modified_base 6: mod_base = OTHER; note = 2'-O-methoxyethyl-guanosine
  modified_base 7: mod_base = OTHER; note = 2'-O-methoxyethyl-thymidine
  modified_base 8: mod_base = OTHER; note = 2'-O-methoxyethyl-thymidine
  modified_base 9: mod_base = OTHER; note = 2'-O-methoxyethyl-adenosine
  modified_base 10: mod_base = OTHER; note = 2'-O-methoxyethyl-adenosine
  modified_base 11: mod_base = OTHER; note = 2'-O-methoxyethyl-adenosine
  modified_base 12: mod_base = OTHER; note = 2'-O-methoxyethyl-5'-methylcytidine
  modified_base 13: mod_base = OTHER; note = 2'-O-methoxyethyl-5'-methylcytidine
  modified_base 14: mod_base = OTHER; note = 2'-O-methoxyethyl-adenosine
  modified_base 15: mod_base = OTHER; note = 2'-O-methoxyethyl-adenosine
  modified_base 16: mod_base = OTHER; note = 2'-O-methoxyethyl-guanosine
  modified_base 17: mod_base = OTHER; note = 2'-O-methoxyethyl-guanosine
  modified_base 18: mod_base = OTHER; note = 2'-O-methoxyethyl-guanosine
ataatgttaaaccaaggg

SEQ ID NO: 556 - RNA, 18 nt, synthetic construct
  source 1..18: mol_type = other RNA
  modified_base 1: mod_base = OTHER; note = 2'-O-methoxyethyl-guanosine
  modified_base 2: mod_base = OTHER; note = 2'-O-methoxyethyl-guanosine
  modified_base 3: mod_base = OTHER; note = 2'-O-methoxyethyl-adenosine
  modified_base 4: mod_base = OTHER; note = 2'-O-methoxyethyl-guanosine
  modified_base 5: mod_base = OTHER; note = 2'-O-methoxyethyl-adenosine
  modified_base 6: mod_base = OTHER; note = 2'-O-methoxyethyl-adenosine
  modified_base 7: mod_base = OTHER; note = 2'-O-methoxyethyl-thymidine
  modified_base 8: mod_base = OTHER; note = 2'-O-methoxyethyl-adenosine
  modified_base 9: mod_base = OTHER; note = 2'-O-methoxyethyl-adenosine
  modified_base 10: mod_base = OTHER; note = 2'-O-methoxyethyl-thymidine
  modified_base 11: mod_base = OTHER; note = 2'-O-methoxyethyl-guanosine
  modified_base 12: mod_base = OTHER; note = 2'-O-methoxyethyl-thymidine
  modified_base 13: mod_base = OTHER; note = 2'-O-methoxyethyl-thymidine
  modified_base 14: mod_base = OTHER; note = 2'-O-methoxyethyl-adenosine
  modified_base 15: mod_base = OTHER; note = 2'-O-methoxyethyl-adenosine
  modified_base 16: mod_base = OTHER; note = 2'-O-methoxyethyl-adenosine
  modified_base 17: mod_base = OTHER; note = 2'-O-methoxyethyl-5'-methylcytidine
  modified_base 18: mod_base = OTHER; note = 2'-O-methoxyethyl-5'-methylcytidine
ggagaataatgttaaacc

SEQ ID NO: 557 - RNA, 18 nt, synthetic construct
  source 1..18: mol_type = other RNA
  modified_base 1: mod_base = OTHER; note = 2'-O-methoxyethyl-guanosine
  modified_base 2: mod_base = OTHER; note = 2'-O-methoxyethyl-guanosine
  modified_base 3: mod_base = OTHER; note = 2'-O-methoxyethyl-guanosine
  modified_base 4: mod_base = OTHER; note = 2'-O-methoxyethyl-guanosine
  modified_base 5: mod_base = OTHER; note = 2'-O-methoxyethyl-adenosine
  modified_base 6: mod_base = OTHER; note = 2'-O-methoxyethyl-guanosine
  modified_base 7: mod_base = OTHER; note = 2'-O-methoxyethyl-guanosine
  modified_base 8: mod_base = OTHER; note = 2'-O-methoxyethyl-adenosine
  modified_base 9: mod_base = OTHER; note = 2'-O-methoxyethyl-guanosine
  modified_base 10: mod_base = OTHER; note = 2'-O-methoxyethyl-adenosine
  modified_base 11: mod_base = OTHER; note = 2'-O-methoxyethyl-adenosine
  modified_base 12: mod_base = OTHER; note = 2'-O-methoxyethyl-thymidine
  modified_base 13: mod_base = OTHER; note = 2'-O-methoxyethyl-adenosine
  modified_base 14: mod_base = OTHER; note = 2'-O-methoxyethyl-adenosine
  modified_base 15: mod_base = OTHER; note = 2'-O-methoxyethyl-thymidine
  modified_base 16: mod_base = OTHER; note = 2'-O-methoxyethyl-guanosine
  modified_base 17: mod_base = OTHER; note = 2'-O-methoxyethyl-thymidine
  modified_base 18: mod_base = OTHER; note = 2'-O-methoxyethyl-thymidine
ggggaggagaataatgtt

SEQ ID NO: 558 - RNA, 18 nt, synthetic construct
  source 1..18: mol_type = other RNA
  modified_base 1: mod_base = OTHER; note = 2'-O-methoxyethyl-adenosine
  modified_base 2: mod_base = OTHER; note = 2'-O-methoxyethyl-adenosine
  modified_base 3: mod_base = OTHER; note = 2'-O-methoxyethyl-adenosine
  modified_base 4: mod_base = OTHER; note = 2'-O-methoxyethyl-thymidine
  modified_base 5: mod_base = OTHER; note = 2'-O-methoxyethyl-thymidine
  modified_base 6: mod_base = OTHER; note = 2'-O-methoxyethyl-guanosine
  modified_base 7: mod_base = OTHER; note = 2'-O-methoxyethyl-guanosine
  modified_base 8: mod_base = OTHER; note = 2'-O-methoxyethyl-guanosine
  modified_base 9: mod_base = OTHER; note = 2'-O-methoxyethyl-guanosine
  modified_base 10: mod_base = OTHER; note = 2'-O-methoxyethyl-adenosine
  modified_base 11: mod_base = OTHER; note = 2'-O-methoxyethyl-guanosine
  modified_base 12: mod_base = OTHER; note = 2'-O-methoxyethyl-guanosine
  modified_base 13: mod_base = OTHER; note = 2'-O-methoxyethyl-adenosine
  modified_base 14: mod_base = OTHER; note = 2'-O-methoxyethyl-guanosine
  modified_base 15: mod_base = OTHER; note = 2'-O-methoxyethyl-adenosine
  modified_base 16: mod_base = OTHER; note = 2'-O-methoxyethyl-adenosine
  modified_base 17: mod_base = OTHER; note = 2'-O-methoxyethyl-thymidine
  modified_base 18: mod_base = OTHER; note = 2'-O-methoxyethyl-adenosine
aaattggggaggagaata

SEQ ID NO: 559 - RNA, 18 nt, synthetic construct
  source 1..18: mol_type = other RNA
  modified_base 1: mod_base = OTHER; note = 2'-O-methoxyethyl-adenosine
  modified_base 2: mod_base = OTHER; note = 2'-O-methoxyethyl-guanosine
  modified_base 3: mod_base = OTHER; note = 2'-O-methoxyethyl-adenosine
  modified_base 4: mod_base = OTHER; note = 2'-O-methoxyethyl-guanosine
  modified_base 5: mod_base = OTHER; note = 2'-O-methoxyethyl-guanosine
  modified_base 6: mod_base = OTHER; note = 2'-O-methoxyethyl-adenosine
  modified_base 7: mod_base = OTHER; note = 2'-O-methoxyethyl-adenosine
  modified_base 8: mod_base = OTHER; note = 2'-O-methoxyethyl-adenosine
  modified_base 9: mod_base = OTHER; note = 2'-O-methoxyethyl-thymidine
  modified_base 10: mod_base = OTHER; note = 2'-O-methoxyethyl-thymidine
  modified_base 11: mod_base = OTHER; note = 2'-O-methoxyethyl-guanosine
  modified_base 12: mod_base = OTHER; note = 2'-O-methoxyethyl-guanosine
  modified_base 13: mod_base = OTHER; note = 2'-O-methoxyethyl-guanosine
  modified_base 14: mod_base = OTHER; note = 2'-O-methoxyethyl-guanosine
  modified_base 15: mod_base = OTHER; note = 2'-O-methoxyethyl-adenosine
  modified_base 16: mod_base = OTHER; note = 2'-O-methoxyethyl-guanosine
  modified_base 17: mod_base = OTHER; note = 2'-O-methoxyethyl-guanosine
  modified_base 18: mod_base = OTHER; note = 2'-O-methoxyethyl-adenosine
agaggaaattggggagga

SEQ ID NO: 560 - RNA, 18 nt, synthetic construct
  source 1..18: mol_type = other RNA
  modified_base 1: mod_base = OTHER; note = 2'-O-methoxyethyl-guanosine
  modified_base 2: mod_base = OTHER; note = 2'-O-methoxyethyl-guanosine
  modified_base 3: mod_base = OTHER; note = 2'-O-methoxyethyl-adenosine
  modified_base 4: mod_base = OTHER; note = 2'-O-methoxyethyl-guanosine
  modified_base 5: mod_base = OTHER; note = 2'-O-methoxyethyl-adenosine
  modified_base 6: mod_base = OTHER; note = 2'-O-methoxyethyl-adenosine
  modified_base 7: mod_base = OTHER; note = 2'-O-methoxyethyl-guanosine
  modified_base 8: mod_base = OTHER; note = 2'-O-methoxyethyl-adenosine
  modified_base 9: mod_base = OTHER; note = 2'-O-methoxyethyl-guanosine
  modified_base 10: mod_base = OTHER; note = 2'-O-methoxyethyl-guanosine
  modified_base 11: mod_base = OTHER; note = 2'-O-methoxyethyl-adenosine
  modified_base 12: mod_base = OTHER; note = 2'-O-methoxyethyl-adenosine
  modified_base 13: mod_base = OTHER; note = 2'-O-methoxyethyl-adenosine
  modified_base 14: mod_base = OTHER; note = 2'-O-methoxyethyl-thymidine
  modified_base 15: mod_base = OTHER; note = 2'-O-methoxyethyl-thymidine
  modified_base 16: mod_base = OTHER; note = 2'-O-methoxyethyl-guanosine
  modified_base 17: mod_base = OTHER; note = 2'-O-methoxyethyl-guanosine
  modified_base 18: mod_base = OTHER; note = 2'-O-methoxyethyl-guanosine
ggagaagaggaaattggg

SEQ ID NO: 561 - RNA, 18 nt, synthetic construct
  source 1..18: mol_type = other RNA
  modified_base 1: mod_base = OTHER; note = 2'-O-methoxyethyl-adenosine
  modified_base 2: mod_base = OTHER; note = 2'-O-methoxyethyl-adenosine
  modified_base 3: mod_base = OTHER; note = 2'-O-methoxyethyl-thymidine
  modified_base 4: mod_base = OTHER; note = 2'-O-methoxyethyl-guanosine
  modified_base 5: mod_base = OTHER; note = 2'-O-methoxyethyl-adenosine
  modified_base 6: mod_base = OTHER; note = 2'-O-methoxyethyl-guanosine
  modified_base 7: mod_base = OTHER; note = 2'-O-methoxyethyl-guanosine
  modified_base 8: mod_base = OTHER; note = 2'-O-methoxyethyl-adenosine
  modified_base 9: mod_base = OTHER; note = 2'-O-methoxyethyl-guanosine
  modified_base 10: mod_base = OTHER; note = 2'-O-methoxyethyl-adenosine
  modified_base 11: mod_base = OTHER; note = 2'-O-methoxyethyl-adenosine
  modified_base 12: mod_base = OTHER; note = 2'-O-methoxyethyl-guanosine
  modified_base 13: mod_base = OTHER; note = 2'-O-methoxyethyl-adenosine
  modified_base 14: mod_base = OTHER; note = 2'-O-methoxyethyl-guanosine
  modified_base 15: mod_base = OTHER; note = 2'-O-methoxyethyl-guanosine
  modified_base 16: mod_base = OTHER; note = 2'-O-methoxyethyl-adenosine
  modified_base 17: mod_base = OTHER; note = 2'-O-methoxyethyl-adenosine
  modified_base 18: mod_base = OTHER; note = 2'-O-methoxyethyl-adenosine
aatgaggagaagaggaaa

SEQ ID NO: 562 - RNA, 18 nt, synthetic construct
  source 1..18: mol_type = other RNA
  modified_base 1: mod_base = OTHER; note = 2'-O-methoxyethyl-thymidine
  modified_base 2: mod_base = OTHER; note = 2'-O-methoxyethyl-thymidine
  modified_base 3: mod_base = OTHER; note = 2'-O-methoxyethyl-5'-methylcytidine
  modified_base 4: mod_base = OTHER; note = 2'-O-methoxyethyl-adenosine
  modified_base 5: mod_base = OTHER; note = 2'-O-methoxyethyl-5'-methylcytidine
  modified_base 6: mod_base = OTHER; note = 2'-O-methoxyethyl-adenosine
  modified_base 7: mod_base = OTHER; note = 2'-O-methoxyethyl-adenosine
  modified_base 8: mod_base = OTHER; note = 2'-O-methoxyethyl-thymidine
  modified_base 9: mod_base = OTHER; note = 2'-O-methoxyethyl-guanosine
  modified_base 10: mod_base = OTHER; note = 2'-O-methoxyethyl-adenosine
  modified_base 11: mod_base = OTHER; note = 2'-O-methoxyethyl-guanosine
  modified_base 12: mod_base = OTHER; note = 2'-O-methoxyethyl-guanosine
  modified_base 13: mod_base = OTHER; note = 2'-O-methoxyethyl-adenosine
  modified_base 14: mod_base = OTHER; note = 2'-O-methoxyethyl-guanosine
  modified_base 15: mod_base = OTHER; note = 2'-O-methoxyethyl-adenosine
  modified_base 16: mod_base = OTHER; note = 2'-O-methoxyethyl-adenosine
  modified_base 17: mod_base = OTHER; note = 2'-O-methoxyethyl-guanosine
  modified_base 18: mod_base = OTHER; note = 2'-O-methoxyethyl-adenosine
ttcacaatgaggagaaga

SEQ ID NO: 563 - RNA, 18 nt, synthetic construct
  source 1..18: mol_type = other RNA
  modified_base 1: mod_base = OTHER; note = 2'-O-methoxyethyl-adenosine
  modified_base 2: mod_base = OTHER; note = 2'-O-methoxyethyl-5'-methylcytidine
  modified_base 3: mod_base = OTHER; note = 2'-O-methoxyethyl-guanosine
  modified_base 4: mod_base = OTHER; note = 2'-O-methoxyethyl-adenosine
  modified_base 5: mod_base = OTHER; note = 2'-O-methoxyethyl-guanosine
  modified_base 6: mod_base = OTHER; note = 2'-O-methoxyethyl-thymidine
  modified_base 7: mod_base = OTHER; note = 2'-O-methoxyethyl-thymidine
  modified_base 8: mod_base = OTHER; note = 2'-O-methoxyethyl-5'-methylcytidine
  modified_base 9: mod_base = OTHER; note = 2'-O-methoxyethyl-adenosine
  modified_base 10: mod_base = OTHER; note = 2'-O-methoxyethyl-5'-methylcytidine
  modified_base 11: mod_base = OTHER; note = 2'-O-methoxyethyl-adenosine
  modified_base 12: mod_base = OTHER; note = 2'-O-methoxyethyl-adenosine
  modified_base 13: mod_base = OTHER; note = 2'-O-methoxyethyl-thymidine
  modified_base 14: mod_base = OTHER; note = 2'-O-methoxyethyl-guanosine
  modified_base 15: mod_base = OTHER; note = 2'-O-methoxyethyl-adenosine
  modified_base 16: mod_base = OTHER; note = 2'-O-methoxyethyl-guanosine
  modified_base 17: mod_base = OTHER; note = 2'-O-methoxyethyl-guanosine
  modified_base 18: mod_base = OTHER; note = 2'-O-methoxyethyl-adenosine
acgagttcacaatgagga

SEQ ID NO: 564 - RNA, 18 nt, synthetic construct
  source 1..18: mol_type = other RNA
  modified_base 1: mod_base = OTHER; note = 2'-O-methoxyethyl-5'-methylcytidine
  modified_base 2: mod_base = OTHER; note = 2'-O-methoxyethyl-thymidine
  modified_base 3: mod_base = OTHER; note = 2'-O-methoxyethyl-guanosine
  modified_base 4: mod_base = OTHER; note = 2'-O-methoxyethyl-5'-methylcytidine
  modified_base 5: mod_base = OTHER; note = 2'-O-methoxyethyl-5'-methylcytidine
  modified_base 6: mod_base = OTHER; note = 2'-O-methoxyethyl-adenosine
  modified_base 7: mod_base = OTHER; note = 2'-O-methoxyethyl-5'-methylcytidine
  modified_base 8: mod_base = OTHER; note = 2'-O-methoxyethyl-guanosine
  modified_base 9: mod_base = OTHER; note = 2'-O-methoxyethyl-adenosine
  modified_base 10: mod_base = OTHER; note = 2'-O-methoxyethyl-guanosine
  modified_base 11: mod_base = OTHER; note = 2'-O-methoxyethyl-thymidine
  modified_base 12: mod_base = OTHER; note = 2'-O-methoxyethyl-thymidine
  modified_base 13: mod_base = OTHER; note = 2'-O-methoxyethyl-5'-methylcytidine
  modified_base 14: mod_base = OTHER; note = 2'-O-methoxyethyl-adenosine
  modified_base 15: mod_base = OTHER; note = 2'-O-methoxyethyl-5'-methylcytidine
  modified_base 16: mod_base = OTHER; note = 2'-O-methoxyethyl-adenosine
  modified_base 17: mod_base = OTHER; note = 2'-O-methoxyethyl-adenosine
  modified_base 18: mod_base = OTHER; note = 2'-O-methoxyethyl-thymidine
ctgccacgagttcacaat

SEQ ID NO: 565 - RNA, 18 nt, synthetic construct
  source 1..18: mol_type = other RNA
  modified_base 1: mod_base = OTHER; note = 2'-O-methoxyethyl-adenosine
  modified_base 2: mod_base = OTHER; note = 2'-O-methoxyethyl-guanosine
  modified_base 3: mod_base = OTHER; note = 2'-O-methoxyethyl-adenosine
  modified_base 4: mod_base = OTHER; note = 2'-O-methoxyethyl-5'-methylcytidine
  modified_base 5: mod_base = OTHER; note = 2'-O-methoxyethyl-5'-methylcytidine
  modified_base 6: mod_base = OTHER; note = 2'-O-methoxyethyl-5'-methylcytidine
  modified_base 7: mod_base = OTHER; note = 2'-O-methoxyethyl-thymidine
  modified_base 8: mod_base = OTHER; note = 2'-O-methoxyethyl-guanosine
  modified_base 9: mod_base = OTHER; note = 2'-O-methoxyethyl-5'-methylcytidine
  modified_base 10: mod_base = OTHER; note = 2'-O-methoxyethyl-5'-methylcytidine
  modified_base 11: mod_base = OTHER; note = 2'-O-methoxyethyl-adenosine
  modified_base 12: mod_base = OTHER; note = 2'-O-methoxyethyl-5'-methylcytidine
  modified_base 13: mod_base = OTHER; note = 2'-O-methoxyethyl-guanosine
  modified_base 14: mod_base = OTHER; note = 2'-O-methoxyethyl-adenosine
  modified_base 15: mod_base = OTHER; note = 2'-O-methoxyethyl-guanosine
  modified_base 16: mod_base = OTHER; note = 2'-O-methoxyethyl-thymidine
  modified_base 17: mod_base = OTHER; note = 2'-O-methoxyethyl-thymidine
  modified_base 18: mod_base = OTHER; note = 2'-O-methoxyethyl-5'-methylcytidine
agaccctgccacgagttc

SEQ ID NO: 566 - RNA, 18 nt, synthetic construct
  source 1..18: mol_type = other RNA
  modified_base 1: mod_base = OTHER; note = 2'-O-methoxyethyl-5'-methylcytidine
  modified_base 2: mod_base = OTHER; note = 2'-O-methoxyethyl-adenosine
  modified_base 3: mod_base = OTHER; note = 2'-O-methoxyethyl-adenosine
  modified_base 4: mod_base = OTHER; note = 2'-O-methoxyethyl-guanosine
  modified_base 5: mod_base = OTHER; note = 2'-O-methoxyethyl-5'-methylcytidine
  modified_base 6: mod_base = OTHER; note = 2'-O-methoxyethyl-adenosine
  modified_base 7: mod_base = OTHER; note = 2'-O-methoxyethyl-guanosine
  modified_base 8: mod_base = OTHER; note = 2'-O-methoxyethyl-adenosine
  modified_base 9: mod_base = OTHER; note = 2'-O-methoxyethyl-5'-methylcytidine
  modified_base 10: mod_base = OTHER; note = 2'-O-methoxyethyl-5'-methylcytidine
  modified_base 11: mod_base = OTHER; note = 2'-O-methoxyethyl-5'-methylcytidine
  modified_base 12: mod_base = OTHER; note = 2'-O-methoxyethyl-thymidine
  modified_base 13: mod_base = OTHER; note = 2'-O-methoxyethyl-guanosine
  modified_base 14: mod_base = OTHER; note = 2'-O-methoxyethyl-5'-methylcytidine
  modified_base 15: mod_base = OTHER; note = 2'-O-methoxyethyl-5'-methylcytidine
  modified_base 16: mod_base = OTHER; note = 2'-O-methoxyethyl-adenosine
  modified_base 17: mod_base = OTHER; note = 2'-O-methoxyethyl-5'-methylcytidine
  modified_base 18: mod_base = OTHER; note = 2'-O-methoxyethyl-guanosine
caagcagaccctgccacg

SEQ ID NO: 567 - RNA, 18 nt, synthetic construct
  source 1..18: mol_type = other RNA
  modified_base 1: mod_base = OTHER; note = 2'-O-methoxyethyl-5'-methylcytidine
  modified_base 2: mod_base = OTHER; note = 2'-O-methoxyethyl-thymidine
  modified_base 3: mod_base = OTHER; note = 2'-O-methoxyethyl-5'-methylcytidine
  modified_base 4: mod_base = OTHER; note = 2'-O-methoxyethyl-adenosine
  modified_base 5: mod_base = OTHER; note = 2'-O-methoxyethyl-5'-methylcytidine
  modified_base 6: mod_base = OTHER; note = 2'-O-methoxyethyl-5'-methylcytidine
  modified_base 7: mod_base = OTHER; note = 2'-O-methoxyethyl-adenosine
  modified_base 8: mod_base = OTHER; note = 2'-O-methoxyethyl-adenosine
  modified_base 9: mod_base = OTHER; note = 2'-O-methoxyethyl-guanosine
  modified_base 10: mod_base = OTHER; note = 2'-O-methoxyethyl-5'-methylcytidine
  modified_base 11: mod_base = OTHER; note = 2'-O-methoxyethyl-adenosine
  modified_base 12: mod_base = OTHER; note = 2'-O-methoxyethyl-guanosine
  modified_base 13: mod_base = OTHER; note = 2'-O-methoxyethyl-adenosine
  modified_base 14: mod_base = OTHER; note = 2'-O-methoxyethyl-5'-methylcytidine
  modified_base 15: mod_base = OTHER; note = 2'-O-methoxyethyl-5'-methylcytidine
  modified_base 16: mod_base = OTHER; note = 2'-O-methoxyethyl-5'-methylcytidine
  modified_base 17: mod_base = OTHER; note = 2'-O-methoxyethyl-thymidine
  modified_base 18: mod_base = OTHER; note = 2'-O-methoxyethyl-guanosine
ctcaccaagcagaccctg

SEQ ID NO: 568 - RNA, 18 nt, synthetic construct
  source 1..18: mol_type = other RNA
  modified_base 1: mod_base = OTHER; note = 2'-O-methoxyethyl-guanosine
  modified_base 2: mod_base = OTHER; note = 2'-O-methoxyethyl-adenosine
  modified_base 3: mod_base = OTHER; note = 2'-O-methoxyethyl-guanosine
  modified_base 4: mod_base = OTHER; note = 2'-O-methoxyethyl-5'-methylcytidine
  modified_base 5: mod_base = OTHER; note = 2'-O-methoxyethyl-thymidine
  modified_base 6: mod_base = OTHER; note = 2'-O-methoxyethyl-5'-methylcytidine
  modified_base 7: mod_base = OTHER; note = 2'-O-methoxyethyl-adenosine
  modified_base 8: mod_base = OTHER; note = 2'-O-methoxyethyl-5'-methylcytidine
  modified_base 9: mod_base = OTHER; note = 2'-O-methoxyethyl-5'-methylcytidine
  modified_base 10: mod_base = OTHER; note = 2'-O-methoxyethyl-adenosine
  modified_base 11: mod_base = OTHER; note = 2'-O-methoxyethyl-adenosine
  modified_base 12: mod_base = OTHER; note = 2'-O-methoxyethyl-guanosine
  modified_base 13: mod_base = OTHER; note = 2'-O-methoxyethyl-5'-methylcytidine
  modified_base 14: mod_base = OTHER; note = 2'-O-methoxyethyl-adenosine
  modified_base 15: mod_base = OTHER; note = 2'-O-methoxyethyl-guanosine
  modified_base 16: mod_base = OTHER; note = 2'-O-methoxyethyl-adenosine
  modified_base 17: mod_base = OTHER; note = 2'-O-methoxyethyl-5'-methylcytidine
  modified_base 18: mod_base = OTHER; note = 2'-O-methoxyethyl-5'-methylcytidine
gagctcaccaagcagacc

SEQ ID NO: 569 - RNA, 18 nt, synthetic construct
  source 1..18: mol_type = other RNA
  modified_base 1: mod_base = OTHER; note = 2'-O-methoxyethyl-adenosine
  modified_base 2: mod_base = OTHER; note = 2'-O-methoxyethyl-guanosine
  modified_base 3: mod_base = OTHER; note = 2'-O-methoxyethyl-adenosine
  modified_base 4: mod_base = OTHER; note = 2'-O-methoxyethyl-adenosine
  modified_base 5: mod_base = OTHER; note = 2'-O-methoxyethyl-thymidine
  modified_base 6: mod_base = OTHER; note = 2'-O-methoxyethyl-guanosine
  modified_base 7: mod_base = OTHER; note = 2'-O-methoxyethyl-adenosine
  modified_base 8: mod_base = OTHER; note = 2'-O-methoxyethyl-guanosine
  modified_base 9: mod_base = OTHER; note = 2'-O-methoxyethyl-5'-methylcytidine
  modified_base 10: mod_base = OTHER; note = 2'-O-methoxyethyl-thymidine
  modified_base 11: mod_base = OTHER; note = 2'-O-methoxyethyl-5'-methylcytidine
  modified_base 12: mod_base = OTHER; note = 2'-O-methoxyethyl-adenosine
  modified_base 13: mod_base = OTHER; note = 2'-O-methoxyethyl-5'-methylcytidine
  modified_base 14: mod_base = OTHER; note = 2'-O-methoxyethyl-5'-methylcytidine
  modified_base 15: mod_base = OTHER; note = 2'-O-methoxyethyl-adenosine
  modified_base 16: mod_base = OTHER; note = 2'-O-methoxyethyl-adenosine
  modified_base 17: mod_base = OTHER; note = 2'-O-methoxyethyl-guanosine
  modified_base 18: mod_base = OTHER; note = 2'-O-methoxyethyl-5'-methylcytidine
agaatgagctcaccaagc

SEQ ID NO: 570 - RNA, 18 nt, synthetic construct
  source 1..18: mol_type = other RNA
  modified_base 1: mod_base = OTHER; note = 2'-O-methoxyethyl-guanosine
  modified_base 2: mod_base = OTHER; note = 2'-O-methoxyethyl-thymidine
  modified_base 3: mod_base = OTHER; note = 2'-O-methoxyethyl-adenosine
  modified_base 4: mod_base = OTHER; note = 2'-O-methoxyethyl-adenosine
  modified_base 5: mod_base = OTHER; note = 2'-O-methoxyethyl-guanosine
  modified_base 6: mod_base = OTHER; note = 2'-O-methoxyethyl-adenosine
  modified_base 7: mod_base = OTHER; note = 2'-O-methoxyethyl-guanosine
  modified_base 8: mod_base = OTHER; note = 2'-O-methoxyethyl-adenosine
  modified_base 9: mod_base = OTHER; note = 2'-O-methoxyethyl-adenosine
  modified_base 10: mod_base = OTHER; note = 2'-O-methoxyethyl-thymidine
  modified_base 11: mod_base = OTHER; note = 2'-O-methoxyethyl-guanosine
  modified_base 12: mod_base = OTHER; note = 2'-O-methoxyethyl-adenosine
  modified_base 13: mod_base = OTHER; note = 2'-O-methoxyethyl-guanosine
  modified_base 14: mod_base = OTHER; note = 2'-O-methoxyethyl-5'-methylcytidine
  modified_base 15: mod_base = OTHER; note = 2'-O-methoxyethyl-thymidine
  modified_base 16: mod_base = OTHER; note = 2'-O-methoxyethyl-5'-methylcytidine
  modified_base 17: mod_base = OTHER; note = 2'-O-methoxyethyl-adenosine
  modified_base 18: mod_base = OTHER; note = 2'-O-methoxyethyl-5'-methylcytidine
gtaagagaatgagctcac

SEQ ID NO: 571 - RNA, 18 nt, synthetic construct
  source 1..18: mol_type = other RNA
  modified_base 1: mod_base = OTHER; note = 2'-O-methoxyethyl-thymidine
  modified_base 2: mod_base = OTHER; note = 2'-O-methoxyethyl-thymidine
  modified_base 3: mod_base = OTHER; note = 2'-O-methoxyethyl-guanosine
  modified_base 4: mod_base = OTHER; note = 2'-O-methoxyethyl-thymidine
  modified_base 5: mod_base = OTHER; note = 2'-O-methoxyethyl-thymidine
  modified_base 6: mod_base = OTHER; note = 2'-O-methoxyethyl-guanosine
  modified_base 7: mod_base = OTHER; note = 2'-O-methoxyethyl-thymidine
  modified_base 8: mod_base = OTHER; note = 2'-O-methoxyethyl-adenosine
  modified_base 9: mod_base = OTHER; note = 2'-O-methoxyethyl-adenosine
  modified_base 10: mod_base = OTHER; note = 2'-O-methoxyethyl-guanosine
  modified_base 11: mod_base = OTHER; note = 2'-O-methoxyethyl-adenosine
  modified_base 12: mod_base = OTHER; note = 2'-O-methoxyethyl-guanosine
  modified_base 13: mod_base = OTHER; note = 2'-O-methoxyethyl-adenosine
  modified_base 14: mod_base = OTHER; note = 2'-O-methoxyethyl-adenosine
  modified_base 15: mod_base = OTHER; note = 2'-O-methoxyethyl-thymidine
  modified_base 16: mod_base = OTHER; note = 2'-O-methoxyethyl-guanosine
  modified_base 17: mod_base = OTHER; note = 2'-O-methoxyethyl-adenosine
  modified_base 18: mod_base = OTHER; note = 2'-O-methoxyethyl-guanosine
ttgttgtaagagaatgag

SEQ ID NO: 572 - RNA, 18 nt, synthetic construct
  source 1..18: mol_type = other RNA
  modified_base 1: mod_base = OTHER; note = 2'-O-methoxyethyl-adenosine
  modified_base 2: mod_base = OTHER; note = 2'-O-methoxyethyl-thymidine
  modified_base 3: mod_base = OTHER; note = 2'-O-methoxyethyl-thymidine
  modified_base 4: mod_base = OTHER; note = 2'-O-methoxyethyl-thymidine
  modified_base 5: mod_base = OTHER; note = 2'-O-methoxyethyl-guanosine
  modified_base 6: mod_base = OTHER; note = 2'-O-methoxyethyl-thymidine
  modified_base 7: mod_base = OTHER; note = 2'-O-methoxyethyl-thymidine
  modified_base 8: mod_base = OTHER; note = 2'-O-methoxyethyl-guanosine
  modified_base 9: mod_base = OTHER; note = 2'-O-methoxyethyl-thymidine
  modified_base 10: mod_base = OTHER; note = 2'-O-methoxyethyl-thymidine
  modified_base 11: mod_base = OTHER; note = 2'-O-methoxyethyl-guanosine
  modified_base 12: mod_base = OTHER; note = 2'-O-methoxyethyl-thymidine
  modified_base 13: mod_base = OTHER; note = 2'-O-methoxyethyl-adenosine
  modified_base 14: mod_base = OTHER; note = 2'-O-methoxyethyl-adenosine
  modified_base 15: mod_base = OTHER; note = 2'-O-methoxyethyl-guanosine
  modified_base 16: mod_base = OTHER; note = 2'-O-methoxyethyl-adenosine
  modified_base 17: mod_base = OTHER; note = 2'-O-methoxyethyl-guanosine
  modified_base 18: mod_base = OTHER; note = 2'-O-methoxyethyl-adenosine
atttgttgttgtaagaga

SEQ ID NO: 573 - RNA, 18 nt, synthetic construct
  source 1..18: mol_type = other RNA
  modified_base 1: mod_base = OTHER; note = 2'-O-methoxyethyl-5'-methylcytidine
  modified_base 2: mod_base = OTHER; note = 2'-O-methoxyethyl-thymidine
  modified_base 3: mod_base = OTHER; note = 2'-O-methoxyethyl-thymidine
  modified_base 4: mod_base = OTHER; note = 2'-O-methoxyethyl-guanosine
  modified_base 5: mod_base = OTHER; note = 2'-O-methoxyethyl-adenosine
  modified_base 6: mod_base = OTHER; note = 2'-O-methoxyethyl-adenosine
  modified_base 7: mod_base = OTHER; note = 2'-O-methoxyethyl-thymidine
  modified_base 8: mod_base = OTHER; note = 2'-O-methoxyethyl-thymidine
  modified_base 9: mod_base = OTHER; note = 2'-O-methoxyethyl-thymidine
  modified_base 10: mod_base = OTHER; note = 2'-O-methoxyethyl-guanosine
  modified_base 11: mod_base = OTHER; note = 2'-O-methoxyethyl-thymidine
  modified_base 12: mod_base = OTHER; note = 2'-O-methoxyethyl-thymidine
  modified_base 13: mod_base = OTHER; note = 2'-O-methoxyethyl-guanosine
  modified_base 14: mod_base = OTHER; note = 2'-O-methoxyethyl-thymidine
  modified_base 15: mod_base = OTHER; note = 2'-O-methoxyethyl-thymidine
  modified_base 16: mod_base = OTHER; note = 2'-O-methoxyethyl-guanosine
  modified_base 17: mod_base = OTHER; note = 2'-O-methoxyethyl-thymidine
  modified_base 18: mod_base = OTHER; note = 2'-O-methoxyethyl-adenosine
cttgaatttgttgttgta

SEQ ID NO: 574 - RNA, 18 nt, synthetic construct
  source 1..18: mol_type = other RNA
  modified_base 1: mod_base = OTHER; note = 2'-O-methoxyethyl-adenosine
  modified_base 2: mod_base = OTHER; note = 2'-O-methoxyethyl-thymidine
  modified_base 3: mod_base = OTHER; note = 2'-O-methoxyethyl-guanosine
  modified_base 4: mod_base = OTHER; note = 2'-O-methoxyethyl-5'-methylcytidine
  modified_base 5: mod_base = OTHER; note = 2'-O-methoxyethyl-thymidine
  modified_base 6: mod_base = OTHER; note = 2'-O-methoxyethyl-5'-methylcytidine
  modified_base 7: mod_base = OTHER; note = 2'-O-methoxyethyl-thymidine
  modified_base 8: mod_base = OTHER; note = 2'-O-methoxyethyl-thymidine
  modified_base 9: mod_base = OTHER; note = 2'-O-methoxyethyl-guanosine
  modified_base 10: mod_base = OTHER; note = 2'-O-methoxyethyl-adenosine
  modified_base 11: mod_base = OTHER; note = 2'-O-methoxyethyl-adenosine
  modified_base 12: mod_base = OTHER; note = 2'-O-methoxyethyl-thymidine
  modified_base 13: mod_base = OTHER; note = 2'-O-methoxyethyl-thymidine
  modified_base 14: mod_base = OTHER; note = 2'-O-methoxyethyl-thymidine
  modified_base 15: mod_base = OTHER; note = 2'-O-methoxyethyl-guanosine
  modified_base 16: mod_base = OTHER; note = 2'-O-methoxyethyl-thymidine
  modified_base 17: mod_base = OTHER; note = 2'-O-methoxyethyl-thymidine
  modified_base 18: mod_base = OTHER; note = 2'-O-methoxyethyl-guanosine
atgctcttgaatttgttg

SEQ ID NO: 575 - RNA, 18 nt, synthetic construct
  source 1..18: mol_type = other RNA
  modified_base 1: mod_base = OTHER; note = 2'-O-methoxyethyl-thymidine
  modified_base 2: mod_base = OTHER; note = 2'-O-methoxyethyl-5'-methylcytidine
  modified_base 3: mod_base = OTHER; note = 2'-O-methoxyethyl-thymidine
  modified_base 4: mod_base = OTHER; note = 2'-O-methoxyethyl-thymidine
  modified_base 5: mod_base = OTHER; note = 2'-O-methoxyethyl-5'-methylcytidine
  modified_base 6: mod_base = OTHER; note = 2'-O-methoxyethyl-adenosine
  modified_base 7: mod_base = OTHER; note = 2'-O-methoxyethyl-thymidine
  modified_base 8: mod_base = OTHER; note = 2'-O-methoxyethyl-guanosine
  modified_base 9: mod_base = OTHER; note = 2'-O-methoxyethyl-5'-methylcytidine
  modified_base 10: mod_base = OTHER; note = 2'-O-methoxyethyl-thymidine
  modified_base 11: mod_base = OTHER; note = 2'-O-methoxyethyl-5'-methylcytidine
  modified_base 12: mod_base = OTHER; note = 2'-O-methoxyethyl-thymidine
  modified_base 13: mod_base = OTHER; note = 2'-O-methoxyethyl-thymidine
  modified_base 14: mod_base = OTHER; note = 2'-O-methoxyethyl-guanosine
  modified_base 15: mod_base = OTHER; note = 2'-O-methoxyethyl-adenosine
  modified_base 16: mod_base = OTHER; note = 2'-O-methoxyethyl-adenosine
  modified_base 17: mod_base = OTHER; note = 2'-O-methoxyethyl-thymidine
  modified_base 18: mod_base = OTHER; note = 2'-O-methoxyethyl-thymidine
tcttcatgctcttgaatt

SEQ ID NO: 576 - RNA, 18 nt, synthetic construct
  source 1..18: mol_type = other RNA
  modified_base 1: mod_base = OTHER; note = 2'-O-methoxyethyl-5'-methylcytidine
  modified_base 2: mod_base = OTHER; note = 2'-O-methoxyethyl-thymidine
  modified_base 3: mod_base = OTHER; note = 2'-O-methoxyethyl-thymidine
  modified_base 4: mod_base = OTHER; note = 2'-O-methoxyethyl-5'-methylcytidine
  modified_base 5: mod_base = OTHER; note = 2'-O-methoxyethyl-5'-methylcytidine
  modified_base 6: mod_base = OTHER; note = 2'-O-methoxyethyl-thymidine
  modified_base 7: mod_base = OTHER; note = 2'-O-methoxyethyl-5'-methylcytidine
  modified_base 8: mod_base = OTHER; note = 2'-O-methoxyethyl-thymidine
  modified_base 9: mod_base = OTHER; note = 2'-O-methoxyethyl-thymidine
  modified_base 10: mod_base = OTHER; note = 2'-O-methoxyethyl-5'-methylcytidine
  modified_base 11: mod_base = OTHER; note = 2'-O-methoxyethyl-adenosine
  modified_base 12: mod_base = OTHER; note = 2'-O-methoxyethyl-thymidine
  modified_base 13: mod_base = OTHER; note = 2'-O-methoxyethyl-guanosine
  modified_base 14: mod_base = OTHER; note = 2'-O-methoxyethyl-5'-methylcytidine
  modified_base 15: mod_base = OTHER; note = 2'-O-methoxyethyl-thymidine
  modified_base 16: mod_base = OTHER; note = 2'-O-methoxyethyl-5'-methylcytidine
  modified_base 17: mod_base = OTHER; note = 2'-O-methoxyethyl-thymidine
  modified_base 18: mod_base = OTHER; note = 2'-O-methoxyethyl-thymidine
cttcctcttcatgctctt

SEQ ID NO: 577 - RNA, 18 nt, synthetic construct
  source 1..18: mol_type = other RNA
  modified_base 1: mod_base = OTHER; note = 2'-O-methoxyethyl-guanosine
  modified_base 2: mod_base = OTHER; note = 2'-O-methoxyethyl-5'-methylcytidine
  modified_base 3: mod_base = OTHER; note = 2'-O-methoxyethyl-guanosine
  modified_base 4: mod_base = OTHER; note = 2'-O-methoxyethyl-5'-methylcytidine
  modified_base 5: mod_base = OTHER; note = 2'-O-methoxyethyl-guanosine
  modified_base 6: mod_base = OTHER; note = 2'-O-methoxyethyl-5'-methylcytidine
  modified_base 7: mod_base = OTHER; note = 2'-O-methoxyethyl-thymidine
  modified_base 8: mod_base = OTHER; note = 2'-O-methoxyethyl-thymidine
  modified_base 9: mod_base = OTHER; note = 2'-O-methoxyethyl-5'-methylcytidine
  modified_base 10: mod_base = OTHER; note = 2'-O-methoxyethyl-5'-methylcytidine
  modified_base 11: mod_base = OTHER; note = 2'-O-methoxyethyl-thymidine
  modified_base 12: mod_base = OTHER; note = 2'-O-methoxyethyl-5'-methylcytidine
  modified_base 13: mod_base = OTHER; note = 2'-O-methoxyethyl-thymidine
  modified_base 14: mod_base = OTHER; note = 2'-O-methoxyethyl-thymidine
  modified_base 15: mod_base = OTHER; note = 2'-O-methoxyethyl-5'-methylcytidine
  modified_base 16: mod_base = OTHER; note = 2'-O-methoxyethyl-adenosine
  modified_base 17: mod_base = OTHER; note = 2'-O-methoxyethyl-thymidine
  modified_base 18: mod_base = OTHER; note = 2'-O-methoxyethyl-guanosine
gcgcgcttcctcttcatg

SEQ ID NO: 578 - RNA, 18 nt, synthetic construct
  source 1..18: mol_type = other RNA
  modified_base 1: mod_base = OTHER; note = 2'-O-methoxyethyl-guanosine
  modified_base 2: mod_base = OTHER; note = 2'-O-methoxyethyl-5'-methylcytidine
  modified_base 3: mod_base = OTHER; note = 2'-O-methoxyethyl-thymidine
  modified_base 4: mod_base = OTHER; note = 2'-O-methoxyethyl-5'-methylcytidine
  modified_base 5: mod_base = OTHER; note = 2'-O-methoxyethyl-thymidine
  modified_base 6: mod_base = OTHER; note = 2'-O-methoxyethyl-guanosine
  modified_base 7: mod_base = OTHER; note = 2'-O-methoxyethyl-5'-methylcytidine
  modified_base 8: mod_base = OTHER; note = 2'-O-methoxyethyl-guanosine
  modified_base 9: mod_base = OTHER; note = 2'-O-methoxyethyl-5'-methylcytidine
  modified_base 10: mod_base = OTHER; note = 2'-O-methoxyethyl-guanosine
  modified_base 11: mod_base = OTHER; note = 2'-O-methoxyethyl-5'-methylcytidine
  modified_base 12: mod_base = OTHER; note = 2'-O-methoxyethyl-thymidine
  modified_base 13: mod_base = OTHER; note = 2'-O-methoxyethyl-thymidine
  modified_base 14: mod_base = OTHER; note = 2'-O-methoxyethyl-5'-methylcytidine
  modified_base 15: mod_base = OTHER; note = 2'-O-methoxyethyl-5'-methylcytidine
  modified_base 16: mod_base = OTHER; note = 2'-O-methoxyethyl-thymidine
  modified_base 17: mod_base = OTHER; note = 2'-O-methoxyethyl-5'-methylcytidine
  modified_base 18: mod_base = OTHER; note = 2'-O-methoxyethyl-thymidine
gctctgcgcgcttcctct

SEQ ID NO: 579 - RNA, 18 nt, synthetic construct
  source 1..18: mol_type = other RNA
  modified_base 1: mod_base = OTHER; note = 2'-O-methoxyethyl-guanosine
  modified_base 2: mod_base = OTHER; note = 2'-O-methoxyethyl-guanosine
  modified_base 3: mod_base = OTHER; note = 2'-O-methoxyethyl-5'-methylcytidine
  modified_base 4: mod_base = OTHER; note = 2'-O-methoxyethyl-5'-methylcytidine
  modified_base 5: mod_base = OTHER; note = 2'-O-methoxyethyl-adenosine
  modified_base 6: mod_base = OTHER; note = 2'-O-methoxyethyl-guanosine
  modified_base 7: mod_base = OTHER; note = 2'-O-methoxyethyl-5'-methylcytidine
  modified_base 8: mod_base = OTHER; note = 2'-O-methoxyethyl-guanosine
  modified_base 9: mod_base = OTHER; note = 2'-O-methoxyethyl-guanosine
  modified_base 10: mod_base = OTHER; note = 2'-O-methoxyethyl-5'-methylcytidine
  modified_base 11: mod_base = OTHER; note = 2'-O-methoxyethyl-thymidine
  modified_base 12: mod_base = OTHER; note = 2'-O-methoxyethyl-5'-methylcytidine
  modified_base 13: mod_base = OTHER; note = 2'-O-methoxyethyl-thymidine
  modified_base 14: mod_base = OTHER; note = 2'-O-methoxyethyl-guanosine
  modified_base 15: mod_base = OTHER; note = 2'-O-methoxyethyl-5'-methylcytidine
  modified_base 16: mod_base = OTHER; note = 2'-O-methoxyethyl-guanosine
  modified_base 17: mod_base = OTHER; note = 2'-O-methoxyethyl-5'-methylcytidine
  modified_base 18: mod_base = OTHER; note = 2'-O-methoxyethyl-guanosine
ggccagcggctctgcgcg

SEQ ID NO: 580 - RNA, 18 nt, synthetic construct
  source 1..18: mol_type = other RNA
  modified_base 1: mod_base = OTHER; note = 2'-O-methoxyethyl-adenosine
  modified_base 2: mod_base = OTHER; note = 2'-O-methoxyethyl-thymidine
  modified_base 3: mod_base = OTHER; note = 2'-O-methoxyethyl-adenosine
  modified_base 4: mod_base = OTHER; note = 2'-O-methoxyethyl-thymidine
  modified_base 5: mod_base = OTHER; note = 2'-O-methoxyethyl-thymidine
  modified_base 6: mod_base = OTHER; note = 2'-O-methoxyethyl-guanosine
  modified_base 7: mod_base = OTHER; note = 2'-O-methoxyethyl-guanosine
  modified_base 8: mod_base = OTHER; note = 2'-O-methoxyethyl-5'-methylcytidine
  modified_base 9: mod_base = OTHER; note = 2'-O-methoxyethyl-5'-methylcytidine
  modified_base 10: mod_base = OTHER; note = 2'-O-methoxyethyl-adenosine
  modified_base 11: mod_base = OTHER; note = 2'-O-methoxyethyl-guanosine
  modified_base 12: mod_base = OTHER; note = 2'-O-methoxyethyl-5'-methylcytidine
  modified_base 13: mod_base = OTHER; note = 2'-O-methoxyethyl-guanosine
  modified_base 14: mod_base = OTHER; note = 2'-O-methoxyethyl-guanosine
  modified_base 15: mod_base = OTHER; note = 2'-O-methoxyethyl-5'-methylcytidine
  modified_base 16: mod_base = OTHER; note = 2'-O-methoxyethyl-thymidine
  modified_base 17: mod_base = OTHER; note = 2'-O-methoxyethyl-5'-methylcytidine
  modified_base 18: mod_base = OTHER; note = 2'-O-methoxyethyl-thymidine
atattggccagcggctct

SEQ ID NO: 581 - RNA, 18 nt, synthetic construct
  source 1..18: mol_type = other RNA
  modified_base 1: mod_base = OTHER; note = 2'-O-methoxyethyl-guanosine
  modified_base 2: mod_base = OTHER; note = 2'-O-methoxyethyl-thymidine
  modified_base 3: mod_base = OTHER; note = 2'-O-methoxyethyl-guanosine
  modified_base 4: mod_base = OTHER; note = 2'-O-methoxyethyl-5'-methylcytidine
  modified_base 5: mod_base = OTHER; note = 2'-O-methoxyethyl-thymidine
  modified_base 6: mod_base = OTHER; note = 2'-O-methoxyethyl-adenosine
  modified_base 7: mod_base = OTHER; note = 2'-O-methoxyethyl-thymidine
  modified_base 8: mod_base = OTHER; note = 2'-O-methoxyethyl-adenosine
  modified_base 9: mod_base = OTHER; note = 2'-O-methoxyethyl-thymidine
  modified_base 10: mod_base = OTHER; note = 2'-O-methoxyethyl-thymidine
  modified_base 11: mod_base = OTHER; note = 2'-O-methoxyethyl-guanosine
  modified_base 12: mod_base = OTHER; note = 2'-O-methoxyethyl-guanosine
  modified_base 13: mod_base = OTHER; note = 2'-O-methoxyethyl-5'-methylcytidine
  modified_base 14: mod_base = OTHER; note = 2'-O-methoxyethyl-5'-methylcytidine
  modified_base 15: mod_base = OTHER; note = 2'-O-methoxyethyl-adenosine
  modified_base 16: mod_base = OTHER; note = 2'-O-methoxyethyl-guanosine
  modified_base 17: mod_base = OTHER; note = 2'-O-methoxyethyl-5'-methylcytidine
  modified_base 18: mod_base = OTHER; note = 2'-O-methoxyethyl-guanosine
gtgctatattggccagcg

SEQ ID NO: 582 - RNA, 18 nt, synthetic construct
  source 1..18: mol_type = other RNA
  modified_base 1: mod_base = OTHER; note = 2'-O-methoxyethyl-adenosine
  modified_base 2: mod_base = OTHER; note = 2'-O-methoxyethyl-guanosine
  modified_base 3: mod_base = OTHER; note = 2'-O-methoxyethyl-5'-methylcytidine
  modified_base 4: mod_base = OTHER; note = 2'-O-methoxyethyl-thymidine
  modified_base 5: mod_base = OTHER; note = 2'-O-methoxyethyl-5'-methylcytidine
  modified_base 6: mod_base = OTHER; note = 2'-O-methoxyethyl-guanosine
  modified_base 7: mod_base = OTHER; note = 2'-O-methoxyethyl-thymidine
  modified_base 8: mod_base = OTHER; note = 2'-O-methoxyethyl-guanosine
  modified_base 9: mod_base = OTHER; note = 2'-O-methoxyethyl-5'-methylcytidine
  modified_base 10: mod_base = OTHER; note = 2'-O-methoxyethyl-thymidine
  modified_base 11: mod_base = OTHER; note = 2'-O-methoxyethyl-adenosine
  modified_base 12: mod_base = OTHER; note = 2'-O-methoxyethyl-thymidine
  modified_base 13: mod_base = OTHER; note = 2'-O-methoxyethyl-adenosine
  modified_base 14: mod_base = OTHER; note = 2'-O-methoxyethyl-thymidine
  modified_base 15: mod_base = OTHER; note = 2'-O-methoxyethyl-thymidine
  modified_base 16: mod_base = OTHER; note = 2'-O-methoxyethyl-guanosine
  modified_base 17: mod_base = OTHER; note = 2'-O-methoxyethyl-guanosine
  modified_base 18: mod_base = OTHER; note = 2'-O-methoxyethyl-5'-methylcytidine
agctcgtgctatattggc

SEQ ID NO: 583 - RNA, 18 nt, synthetic construct
  source 1..18: mol_type = other RNA
  modified_base 1: mod_base = OTHER; note = 2'-O-methoxyethyl-guanosine
  modified_base 2: mod_base = OTHER; note = 2'-O-methoxyethyl-guanosine
  modified_base 3: mod_base = OTHER; note = 2'-O-methoxyethyl-5'-methylcytidine
  modified_base 4: mod_base = OTHER; note = 2'-O-methoxyethyl-adenosine
  modified_base 5: mod_base = OTHER; note = 2'-O-methoxyethyl-thymidine
  modified_base 6: mod_base = OTHER; note = 2'-O-methoxyethyl-adenosine
  modified_base 7: mod_base = OTHER; note = 2'-O-methoxyethyl-guanosine
  modified_base 8: mod_base = OTHER; note = 2'-O-methoxyethyl-5'-methylcytidine
  modified_base 9: mod_base = OTHER; note = 2'-O-methoxyethyl-thymidine
  modified_base 10: mod_base = OTHER; note = 2'-O-methoxyethyl-5'-methylcytidine
  modified_base 11: mod_base = OTHER; note = 2'-O-methoxyethyl-guanosine
  modified_base 12: mod_base = OTHER; note = 2'-O-methoxyethyl-thymidine
  modified_base 13: mod_base = OTHER; note = 2'-O-methoxyethyl-guanosine
  modified_base 14: mod_base = OTHER; note = 2'-O-methoxyethyl-5'-methylcytidine
  modified_base 15: mod_base = OTHER; note = 2'-O-methoxyethyl-thymidine
  modified_base 16: mod_base = OTHER; note = 2'-O-methoxyethyl-adenosine
  modified_base 17: mod_base = OTHER; note = 2'-O-methoxyethyl-thymidine
  modified_base 18: mod_base = OTHER; note = 2'-O-methoxyethyl-adenosine
ggcatagctcgtgctata

SEQ ID NO: 584 - RNA, 18 nt, synthetic construct
  source 1..18: mol_type = other RNA
  modified_base 1: mod_base = OTHER; note = 2'-O-methoxyethyl-thymidine
  modified_base 2: mod_base = OTHER; note = 2'-O-methoxyethyl-guanosine
  modified_base 3: mod_base = OTHER; note = 2'-O-methoxyethyl-thymidine
  modified_base 4: mod_base = OTHER; note = 2'-O-methoxyethyl-thymidine
  modified_base 5: mod_base = OTHER; note = 2'-O-methoxyethyl-guanosine
  modified_base 6: mod_base = OTHER; note = 2'-O-methoxyethyl-guanosine
  modified_base 7: mod_base = OTHER; note = 2'-O-methoxyethyl-guanosine
  modified_base 8: mod_base = OTHER; note = 2'-O-methoxyethyl-5'-methylcytidine
  modified_base 9: mod_base = OTHER; note = 2'-O-methoxyethyl-adenosine
  modified_base 10: mod_base = OTHER; note = 2'-O-methoxyethyl-thymidine
  modified_base 11: mod_base = OTHER; note = 2'-O-methoxyethyl-adenosine
  modified_base 12: mod_base = OTHER; note = 2'-O-methoxyethyl-guanosine
  modified_base 13: mod_base = OTHER; note = 2'-O-methoxyethyl-5'-methylcytidine
  modified_base 14: mod_base = OTHER; note = 2'-O-methoxyethyl-thymidine
  modified_base 15: mod_base = OTHER; note = 2'-O-methoxyethyl-5'-methylcytidine
  modified_base 16: mod_base = OTHER; note = 2'-O-methoxyethyl-guanosine
  modified_base 17: mod_base = OTHER; note = 2'-O-methoxyethyl-thymidine
  modified_base 18: mod_base = OTHER; note = 2'-O-methoxyethyl-guanosine
tgttgggcatagctcgtg

SEQ ID NO: 585 - RNA, 18 nt, synthetic construct
  source 1..18: mol_type = other RNA
  modified_base 1: mod_base = OTHER; note = 2'-O-methoxyethyl-guanosine
  modified_base 2: mod_base = OTHER; note = 2'-O-methoxyethyl-5'-methylcytidine
  modified_base 3: mod_base = OTHER; note = 2'-O-methoxyethyl-thymidine
  modified_base 4: mod_base = OTHER; note = 2'-O-methoxyethyl-thymidine
  modified_base 5: mod_base = OTHER; note = 2'-O-methoxyethyl-5'-methylcytidine
  modified_base 6: mod_base = OTHER; note = 2'-O-methoxyethyl-thymidine
  modified_base 7: mod_base = OTHER; note = 2'-O-methoxyethyl-guanosine
  modified_base 8: mod_base = OTHER; note = 2'-O-methoxyethyl-thymidine
  modified_base 9: mod_base = OTHER; note = 2'-O-methoxyethyl-thymidine
  modified_base 10: mod_base = OTHER; note = 2'-O-methoxyethyl-guanosine
  modified_base 11: mod_base = OTHER; note = 2'-O-methoxyethyl-guanosine
  modified_base 12: mod_base = OTHER; note = 2'-O-methoxyethyl-guanosine
  modified_base 13: mod_base = OTHER; note = 2'-O-methoxyethyl-5'-methylcytidine
  modified_base 14: mod_base = OTHER; note = 2'-O-methoxyethyl-adenosine
  modified_base 15: mod_base = OTHER; note = 2'-O-methoxyethyl-thymidine
  modified_base 16: mod_base = OTHER; note = 2'-O-methoxyethyl-adenosine
  modified_base 17: mod_base = OTHER; note = 2'-O-methoxyethyl-guanosine
  modified_base 18: mod_base = OTHER; note = 2'-O-methoxyethyl-5'-methylcytidine
gcttctgttgggcatagc

SEQ ID NO: 586 - RNA, 18 nt, synthetic construct
  source 1..18: mol_type = other RNA
  modified_base 1: mod_base = OTHER; note = 2'-O-methoxyethyl-5'-methylcytidine
  modified_base 2: mod_base = OTHER; note = 2'-O-methoxyethyl-thymidine
  modified_base 3: mod_base = OTHER; note = 2'-O-methoxyethyl-thymidine
  modified_base 4: mod_base = OTHER; note = 2'-O-methoxyethyl-guanosine
  modified_base 5: mod_base = OTHER; note = 2'-O-methoxyethyl-5'-methylcytidine
  modified_base 6: mod_base = OTHER; note = 2'-O-methoxyethyl-guanosine
  modified_base 7: mod_base = OTHER; note = 2'-O-methoxyethyl-5'-methylcytidine
  modified_base 8: mod_base = OTHER; note = 2'-O-methoxyethyl-thymidine
  modified_base 9: mod_base = OTHER; note = 2'-O-methoxyethyl-thymidine
  modified_base 10: mod_base = OTHER; note = 2'-O-methoxyethyl-5'-methylcytidine
  modified_base 11: mod_base = OTHER; note = 2'-O-methoxyethyl-thymidine
  modified_base 12: mod_base = OTHER; note = 2'-O-methoxyethyl-guanosine
  modified_base 13: mod_base = OTHER; note = 2'-O-methoxyethyl-thymidine
  modified_base 14: mod_base = OTHER; note = 2'-O-methoxyethyl-thymidine
  modified_base 15: mod_base = OTHER; note = 2'-O-methoxyethyl-guanosine
  modified_base 16: mod_base = OTHER; note = 2'-O-methoxyethyl-guanosine
  modified_base 17: mod_base = OTHER; note = 2'-O-methoxyethyl-guanosine
  modified_base 18: mod_base = OTHER; note = 2'-O-methoxyethyl-5'-methylcytidine
cttgcgcttctgttgggc

SEQ ID NO: 587 - RNA, 18 nt, synthetic construct
  source 1..18: mol_type = other RNA
  modified_base 1: mod_base = OTHER; note = 2'-O-methoxyethyl-5'-methylcytidine
  modified_base 2: mod_base = OTHER; note = 2'-O-methoxyethyl-adenosine
  modified_base 3: mod_base = OTHER; note = 2'-O-methoxyethyl-5'-methylcytidine
  modified_base 4: mod_base = OTHER; note = 2'-O-methoxyethyl-5'-methylcytidine
  modified_base 5: mod_base = OTHER; note = 2'-O-methoxyethyl-thymidine
  modified_base 6: mod_base = OTHER; note = 2'-O-methoxyethyl-thymidine
  modified_base 7: mod_base = OTHER; note = 2'-O-methoxyethyl-guanosine
  modified_base 8: mod_base = OTHER; note = 2'-O-methoxyethyl-5'-methylcytidine
  modified_base 9: mod_base = OTHER; note = 2'-O-methoxyethyl-guanosine
  modified_base 10: mod_base = OTHER; note = 2'-O-methoxyethyl-5'-methylcytidine
  modified_base 11: mod_base = OTHER; note = 2'-O-methoxyethyl-thymidine
  modified_base 12: mod_base = OTHER; note = 2'-O-methoxyethyl-thymidine
  modified_base 13: mod_base = OTHER; note = 2'-O-methoxyethyl-5'-methylcytidine
  modified_base 14: mod_base = OTHER; note = 2'-O-methoxyethyl-thymidine
  modified_base 15: mod_base = OTHER; note = 2'-O-methoxyethyl-guanosine
  modified_base 16: mod_base = OTHER; note = 2'-O-methoxyethyl-thymidine
  modified_base 17: mod_base = OTHER; note = 2'-O-methoxyethyl-thymidine
  modified_base 18: mod_base = OTHER; note = 2'-O-methoxyethyl-guanosine
caccttgcgcttctgttg

SEQ ID NO: 588 - RNA, 18 nt, synthetic construct
  source 1..18: mol_type = other RNA
  modified_base 1: mod_base = OTHER; note = 2'-O-methoxyethyl-thymidine
  modified_base 2: mod_base = OTHER; note = 2'-O-methoxyethyl-5'-methylcytidine
  modified_base 3: mod_base = OTHER; note = 2'-O-methoxyethyl-5'-methylcytidine
  modified_base 4: mod_base = OTHER; note = 2'-O-methoxyethyl-adenosine
  modified_base 5: mod_base = OTHER; note = 2'-O-methoxyethyl-thymidine
  modified_base 6: mod_base = OTHER; note = 2'-O-methoxyethyl-5'-methylcytidine
  modified_base 7: mod_base = OTHER; note = 2'-O-methoxyethyl-adenosine
  modified_base 8: mod_base = OTHER; note = 2'-O-methoxyethyl-5'-methylcytidine
  modified_base 9: mod_base = OTHER; note = 2'-O-methoxyethyl-5'-methylcytidine
  modified_base 10: mod_base = OTHER; note = 2'-O-methoxyethyl-thymidine
  modified_base 11: mod_base = OTHER; note = 2'-O-methoxyethyl-thymidine
  modified_base 12: mod_base = OTHER; note = 2'-O-methoxyethyl-guanosine
  modified_base 13: mod_base = OTHER; note = 2'-O-methoxyethyl-5'-methylcytidine
  modified_base 14: mod_base = OTHER; note = 2'-O-methoxyethyl-guanosine
  modified_base 15: mod_base = OTHER; note = 2'-O-methoxyethyl-5'-methylcytidine
  modified_base 16: mod_base = OTHER; note = 2'-O-methoxyethyl-thymidine
  modified_base 17: mod_base = OTHER; note = 2'-O-methoxyethyl-thymidine
  modified_base 18: mod_base = OTHER; note = 2'-O-methoxyethyl-5'-methylcytidine
tccatcaccttgcgcttc

SEQ ID NO: 589 - RNA, 18 nt, synthetic construct
  source 1..18: mol_type = other RNA
  modified_base 1: mod_base = OTHER; note = 2'-O-methoxyethyl-adenosine
  modified_base 2: mod_base = OTHER; note = 2'-O-methoxyethyl-adenosine
  modified_base 3: mod_base = OTHER; note = 2'-O-methoxyethyl-5'-methylcytidine
  modified_base 4: mod_base = OTHER; note = 2'-O-methoxyethyl-5'-methylcytidine
  modified_base 5: mod_base = OTHER; note = 2'-O-methoxyethyl-adenosine
  modified_base 6: mod_base = OTHER; note = 2'-O-methoxyethyl-thymidine
  modified_base 7: mod_base = OTHER; note = 2'-O-methoxyethyl-5'-methylcytidine
  modified_base 8: mod_base = OTHER; note = 2'-O-methoxyethyl-5'-methylcytidine
  modified_base 9: mod_base = OTHER; note = 2'-O-methoxyethyl-adenosine
  modified_base 10: mod_base = OTHER; note = 2'-O-methoxyethyl-thymidine
  modified_base 11: mod_base = OTHER; note = 2'-O-methoxyethyl-5'-methylcytidine
  modified_base 12: mod_base = OTHER; note = 2'-O-methoxyethyl-adenosine
  modified_base 13: mod_base = OTHER; note = 2'-O-methoxyethyl-5'-methylcytidine
  modified_base 14: mod_base = OTHER; note = 2'-O-methoxyethyl-5'-methylcytidine
  modified_base 15: mod_base = OTHER; note = 2'-O-methoxyethyl-thymidine
  modified_base 16: mod_base = OTHER; note = 2'-O-methoxyethyl-thymidine
  modified_base 17: mod_base = OTHER; note = 2'-O-methoxyethyl-guanosine
  modified_base 18: mod_base = OTHER; note = 2'-O-methoxyethyl-5'-methylcytidine
aaccatccatcaccttgc

SEQ ID NO: 590 - RNA, 18 nt, synthetic construct
  source 1..18: mol_type = other RNA
  modified_base 1: mod_base = OTHER; note = 2'-O-methoxyethyl-5'-methylcytidine
  modified_base 2: mod_base = OTHER; note = 2'-O-methoxyethyl-5'-methylcytidine
  modified_base 3: mod_base = OTHER; note = 2'-O-methoxyethyl-thymidine
  modified_base 4: mod_base = OTHER; note = 2'-O-methoxyethyl-thymidine
  modified_base 5: mod_base = OTHER; note = 2'-O-methoxyethyl-adenosine
  modified_base 6: mod_base = OTHER; note = 2'-O-methoxyethyl-adenosine
  modified_base 7: mod_base = OTHER; note = 2'-O-methoxyethyl-adenosine
  modified_base 8: mod_base = OTHER; note = 2'-O-methoxyethyl-5'-methylcytidine
  modified_base 9: mod_base = OTHER; note = 2'-O-methoxyethyl-5'-methylcytidine
  modified_base 10: mod_base = OTHER; note = 2'-O-methoxyethyl-adenosine
  modified_base 11: mod_base = OTHER; note = 2'-O-methoxyethyl-thymidine
  modified_base 12: mod_base = OTHER; note = 2'-O-methoxyethyl-5'-methylcytidine
  modified_base 13: mod_base = OTHER; note = 2'-O-methoxyethyl-5'-methylcytidine
  modified_base 14: mod_base = OTHER; note = 2'-O-methoxyethyl-adenosine
  modified_base 15: mod_base = OTHER; note = 2'-O-methoxyethyl-thymidine
  modified_base 16: mod_base = OTHER; note = 2'-O-methoxyethyl-5'-methylcytidine
  modified_base 17: mod_base = OTHER; note = 2'-O-methoxyethyl-adenosine
  modified_base 18: mod_base = OTHER; note = 2'-O-methoxyethyl-5'-methylcytidine
ccttaaaccatccatcac

SEQ ID NO: 591 - RNA, 18 nt, synthetic construct
  source 1..18: mol_type = other RNA
  modified_base 1: mod_base = OTHER; note = 2'-O-methoxyethyl-adenosine
  modified_base 2: mod_base = OTHER; note = 2'-O-methoxyethyl-guanosine
  modified_base 3: mod_base = OTHER; note = 2'-O-methoxyethyl-5'-methylcytidine
  modified_base 4: mod_base = OTHER; note = 2'-O-methoxyethyl-5'-methylcytidine
  modified_base 5: mod_base = OTHER; note = 2'-O-methoxyethyl-5'-methylcytidine
  modified_base 6: mod_base = OTHER; note = 2'-O-methoxyethyl-5'-methylcytidine
  modified_base 7: mod_base = OTHER; note = 2'-O-methoxyethyl-5'-methylcytidine
  modified_base 8: mod_base = OTHER; note = 2'-O-methoxyethyl-thymidine
  modified_base 9: mod_base = OTHER; note = 2'-O-methoxyethyl-thymidine
  modified_base 10: mod_base = OTHER; note = 2'-O-methoxyethyl-adenosine
  modified_base 11: mod_base = OTHER; note = 2'-O-methoxyethyl-adenosine
  modified_base 12: mod_base = OTHER; note = 2'-O-methoxyethyl-adenosine
  modified_base 13: mod_base = OTHER; note = 2'-O-methoxyethyl-5'-methylcytidine
  modified_base 14: mod_base = OTHER; note = 2'-O-methoxyethyl-5'-methylcytidine
  modified_base 15: mod_base = OTHER; note = 2'-O-methoxyethyl-adenosine
  modified_base 16: mod_base = OTHER; note = 2'-O-methoxyethyl-thymidine
  modified_base 17: mod_base = OTHER; note = 2'-O-methoxyethyl-5'-methylcytidine
  modified_base 18: mod_base = OTHER; note = 2'-O-methoxyethyl-5'-methylcytidine
agcccccttaaaccatcc

SEQ ID NO: 592 - RNA, 18 nt, synthetic construct
  source 1..18: mol_type = other RNA
  modified_base 1: mod_base = OTHER; note = 2'-O-methoxyethyl-thymidine
  modified_base 2: mod_base = OTHER; note = 2'-O-methoxyethyl-5'-methylcytidine
  modified_base 3: mod_base = OTHER; note = 2'-O-methoxyethyl-guanosine
  modified_base 4: mod_base = OTHER; note = 2'-O-methoxyethyl-guanosine
  modified_base 5: mod_base = OTHER; note = 2'-O-methoxyethyl-thymidine
  modified_base 6: mod_base = OTHER; note = 2'-O-methoxyethyl-adenosine
  modified_base 7: mod_base = OTHER; note = 2'-O-methoxyethyl-guanosine
  modified_base 8: mod_base = OTHER; note = 2'-O-methoxyethyl-5'-methylcytidine
  modified_base 9: mod_base = OTHER; note = 2'-O-methoxyethyl-5'-methylcytidine
  modified_base 10: mod_base = OTHER; note = 2'-O-methoxyethyl-5'-methylcytidine
  modified_base 11: mod_base = OTHER; note = 2'-O-methoxyethyl-5'-methylcytidine
  modified_base 12: mod_base = OTHER; note = 2'-O-methoxyethyl-5'-methylcytidine
  modified_base 13: mod_base = OTHER; note = 2'-O-methoxyethyl-thymidine
  modified_base 14: mod_base = OTHER; note = 2'-O-methoxyethyl-thymidine
  modified_base 15: mod_base = OTHER; note = 2'-O-methoxyethyl-adenosine
  modified_base 16: mod_base = OTHER; note = 2'-O-methoxyethyl-adenosine
  modified_base 17: mod_base = OTHER; note = 2'-O-methoxyethyl-adenosine
  modified_base 18: mod_base = OTHER; note = 2'-O-methoxyethyl-5'-methylcytidine
tcggtagcccccttaaac

SEQ ID NO: 593 - RNA, 18 nt, synthetic construct
  source 1..18: mol_type = other RNA
  modified_base 1: mod_base = OTHER; note = 2'-O-methoxyethyl-adenosine
  modified_base 2: mod_base = OTHER; note = 2'-O-methoxyethyl-thymidine
  modified_base 3: mod_base = OTHER; note = 2'-O-methoxyethyl-guanosine
  modified_base 4: mod_base = OTHER; note = 2'-O-methoxyethyl-thymidine
  modified_base 5: mod_base = OTHER; note = 2'-O-methoxyethyl-adenosine
  modified_base 6: mod_base = OTHER; note = 2'-O-methoxyethyl-thymidine
  modified_base 7: mod_base = OTHER; note = 2'-O-methoxyethyl-5'-methylcytidine
  modified_base 8: mod_base = OTHER; note = 2'-O-methoxyethyl-guanosine
  modified_base 9: mod_base = OTHER; note = 2'-O-methoxyethyl-guanosine
  modified_base 10: mod_base = OTHER; note = 2'-O-methoxyethyl-thymidine
  modified_base 11: mod_base = OTHER; note = 2'-O-methoxyethyl-adenosine
  modified_base 12: mod_base = OTHER; note = 2'-O-methoxyethyl-guanosine
  modified_base 13: mod_base = OTHER; note = 2'-O-methoxyethyl-5'-methylcytidine
  modified_base 14: mod_base = OTHER; note = 2'-O-methoxyethyl-5'-methylcytidine
  modified_base 15: mod_base = OTHER; note = 2'-O-methoxyethyl-5'-methylcytidine
  modified_base 16: mod_base = OTHER; note = 2'-O-methoxyethyl-5'-methylcytidine
  modified_base 17: mod_base = OTHER; note = 2'-O-methoxyethyl-5'-methylcytidine
  modified_base 18: mod_base = OTHER; note = 2'-O-methoxyethyl-thymidine
atgtatcggtagccccct

SEQ ID NO: 594 - RNA, 18 nt, synthetic construct
  source 1..18: mol_type = other RNA
  modified_base 1: mod_base = OTHER; note = 2'-O-methoxyethyl-thymidine
  modified_base 2: mod_base = OTHER; note = 2'-O-methoxyethyl-guanosine
  modified_base 3: mod_base = OTHER; note = 2'-O-methoxyethyl-thymidine
  modified_base 4: mod_base = OTHER; note = 2'-O-methoxyethyl-guanosine
  modified_base 5: mod_base = OTHER; note = 2'-O-methoxyethyl-adenosine
  modified_base 6: mod_base = OTHER; note = 2'-O-methoxyethyl-adenosine
  modified_base 7: mod_base = OTHER; note = 2'-O-methoxyethyl-thymidine
  modified_base 8: mod_base = OTHER; note = 2'-O-methoxyethyl-guanosine
  modified_base 9: mod_base = OTHER; note = 2'-O-methoxyethyl-thymidine
  modified_base 10: mod_base = OTHER; note = 2'-O-methoxyethyl-adenosine
  modified_base 11: mod_base = OTHER; note = 2'-O-methoxyethyl-thymidine
  modified_base 12: mod_base = OTHER; note = 2'-O-methoxyethyl-5'-methylcytidine
  modified_base 13: mod_base = OTHER; note = 2'-O-methoxyethyl-guanosine
  modified_base 14: mod_base = OTHER; note = 2'-O-methoxyethyl-guanosine
  modified_base 15: mod_base = OTHER; note = 2'-O-methoxyethyl-thymidine
  modified_base 16: mod_base = OTHER; note = 2'-O-methoxyethyl-adenosine
  modified_base 17: mod_base = OTHER; note = 2'-O-methoxyethyl-guanosine
  modified_base 18: mod_base = OTHER; note = 2'-O-methoxyethyl-5'-methylcytidine
tgtgaatgtatcggtagc

SEQ ID NO: 595 - RNA, 18 nt, synthetic construct
  source 1..18: mol_type = other RNA
  modified_base 1: mod_base = OTHER; note = 2'-O-methoxyethyl-adenosine
  modified_base 2: mod_base = OTHER; note = 2'-O-methoxyethyl-thymidine
  modified_base 3: mod_base = OTHER; note = 2'-O-methoxyethyl-thymidine
  modified_base 4: mod_base = OTHER; note = 2'-O-methoxyethyl-adenosine
  modified_base 5: mod_base = OTHER; note = 2'-O-methoxyethyl-guanosine
  modified_base 6: mod_base = OTHER; note = 2'-O-methoxyethyl-thymidine
  modified_base 7: mod_base = OTHER; note = 2'-O-methoxyethyl-guanosine
  modified_base 8: mod_base = OTHER; note = 2'-O-methoxyethyl-thymidine
  modified_base 9: mod_base = OTHER; note = 2'-O-methoxyethyl-guanosine
  modified_base 10: mod_base = OTHER; note = 2'-O-methoxyethyl-adenosine
  modified_base 11: mod_base = OTHER; note = 2'-O-methoxyethyl-adenosine
  modified_base 12: mod_base = OTHER; note = 2'-O-methoxyethyl-thymidine
  modified_base 13: mod_base = OTHER; note = 2'-O-methoxyethyl-guanosine
  modified_base 14: mod_base = OTHER; note = 2'-O-methoxyethyl-thymidine
  modified_base 15: mod_base = OTHER; note = 2'-O-methoxyethyl-adenosine
  modified_base 16: mod_base = OTHER; note = 2'-O-methoxyethyl-thymidine
  modified_base 17: mod_base = OTHER; note = 2'-O-methoxyethyl-5'-methylcytidine
  modified_base 18: mod_base = OTHER; note = 2'-O-methoxyethyl-guanosine
attagtgtgaatgtatcg

SEQ ID NO: 596 - RNA, 18 nt, synthetic construct
  source 1..18: mol_type = other RNA
  modified_base 1: mod_base = OTHER; note = 2'-O-methoxyethyl-guanosine
  modified_base 2: mod_base = OTHER; note = 2'-O-methoxyethyl-guanosine
  modified_base 3: mod_base = OTHER; note = 2'-O-methoxyethyl-5'-methylcytidine
  modified_base 4: mod_base = OTHER; note = 2'-O-methoxyethyl-thymidine
  modified_base 5: mod_base = OTHER; note = 2'-O-methoxyethyl-guanosine
  modified_base 6: mod_base = OTHER; note = 2'-O-methoxyethyl-adenosine
  modified_base 7: mod_base = OTHER; note = 2'-O-methoxyethyl-thymidine
  modified_base 8: mod_base = OTHER; note = 2'-O-methoxyethyl-thymidine
  modified_base 9: mod_base = OTHER; note = 2'-O-methoxyethyl-adenosine
  modified_base 10: mod_base = OTHER; note = 2'-O-methoxyethyl-guanosine
  modified_base 11: mod_base = OTHER; note = 2'-O-methoxyethyl-thymidine
  modified_base 12: mod_base = OTHER; note = 2'-O-methoxyethyl-guanosine
  modified_base 13: mod_base = OTHER; note = 2'-O-methoxyethyl-thymidine
  modified_base 14: mod_base = OTHER; note = 2'-O-methoxyethyl-guanosine
  modified_base 15: mod_base = OTHER; note = 2'-O-methoxyethyl-adenosine
  modified_base 16: mod_base = OTHER; note = 2'-O-methoxyethyl-adenosine
  modified_base 17: mod_base = OTHER; note = 2'-O-methoxyethyl-thymidine
  modified_base 18: mod_base = OTHER; note = 2'-O-methoxyethyl-guanosine
ggctgattagtgtgaatg

SEQ ID NO: 597 - RNA, 18 nt, synthetic construct
  source 1..18: mol_type = other RNA
  modified_base 1: mod_base = OTHER; note = 2'-O-methoxyethyl-guanosine
  modified_base 2: mod_base = OTHER; note = 2'-O-methoxyethyl-adenosine
  modified_base 3: mod_base = OTHER; note = 2'-O-methoxyethyl-adenosine
  modified_base 4: mod_base = OTHER; note = 2'-O-methoxyethyl-adenosine
  modified_base 5: mod_base = OTHER; note = 2'-O-methoxyethyl-thymidine
  modified_base 6: mod_base = OTHER; note = 2'-O-methoxyethyl-guanosine
  modified_base 7: mod_base = OTHER; note = 2'-O-methoxyethyl-guanosine
  modified_base 8: mod_base = OTHER; note = 2'-O-methoxyethyl-5'-methylcytidine
  modified_base 9: mod_base = OTHER; note = 2'-O-methoxyethyl-thymidine
  modified_base 10: mod_base = OTHER; note = 2'-O-methoxyethyl-guanosine
  modified_base 11: mod_base = OTHER; note = 2'-O-methoxyethyl-adenosine
  modified_base 12: mod_base = OTHER; note = 2'-O-methoxyethyl-thymidine
  modified_base 13: mod_base = OTHER; note = 2'-O-methoxyethyl-thymidine
  modified_base 14: mod_base = OTHER; note = 2'-O-methoxyethyl-adenosine
  modified_base 15: mod_base = OTHER; note = 2'-O-methoxyethyl-guanosine
  modified_base 16: mod_base = OTHER; note = 2'-O-methoxyethyl-thymidine
  modified_base 17: mod_base = OTHER; note = 2'-O-methoxyethyl-guanosine
  modified_base 18: mod_base = OTHER; note = 2'-O-methoxyethyl-thymidine
gaaatggctgattagtgt

SEQ ID NO: 598 - RNA, 18 nt, synthetic construct
  source 1..18: mol_type = other RNA
  modified_base 1: mod_base = OTHER; note = 2'-O-methoxyethyl-thymidine
  modified_base 2: mod_base = OTHER; note = 2'-O-methoxyethyl-guanosine
  modified_base 3: mod_base = OTHER; note = 2'-O-methoxyethyl-guanosine
  modified_base 4: mod_base = OTHER; note = 2'-O-methoxyethyl-5'-methylcytidine
  modified_base 5: mod_base = OTHER; note = 2'-O-methoxyethyl-adenosine
  modified_base 6: mod_base = OTHER; note = 2'-O-methoxyethyl-guanosine
  modified_base 7: mod_base = OTHER; note = 2'-O-methoxyethyl-adenosine
  modified_base 8: mod_base = OTHER; note = 2'-O-methoxyethyl-adenosine
  modified_base 9: mod_base = OTHER; note = 2'-O-methoxyethyl-adenosine
  modified_base 10: mod_base = OTHER; note = 2'-O-methoxyethyl-thymidine
  modified_base 11: mod_base = OTHER; note = 2'-O-methoxyethyl-guanosine
  modified_base 12: mod_base = OTHER; note = 2'-O-methoxyethyl-guanosine
  modified_base 13: mod_base = OTHER; note = 2'-O-methoxyethyl-5'-methylcytidine
  modified_base 14: mod_base = OTHER; note = 2'-O-methoxyethyl-thymidine
  modified_base 15: mod_base = OTHER; note = 2'-O-methoxyethyl-guanosine
  modified_base 16: mod_base = OTHER; note = 2'-O-methoxyethyl-adenosine
  modified_base 17: mod_base = OTHER; note = 2'-O-methoxyethyl-thymidine
  modified_base 18: mod_base = OTHER; note = 2'-O-methoxyethyl-thymidine
tggcagaaatggctgatt

SEQ ID NO: 599 - RNA, 18 nt, synthetic construct
  source 1..18: mol_type = other RNA
  modified_base 1: mod_base = OTHER; note = 2'-O-methoxyethyl-guanosine
  modified_base 2: mod_base = OTHER; note = 2'-O-methoxyethyl-adenosine
  modified_base 3: mod_base = OTHER; note = 2'-O-methoxyethyl-thymidine
  modified_base 4: mod_base = OTHER; note = 2'-O-methoxyethyl-5'-methylcytidine
  modified_base 5: mod_base = OTHER; note = 2'-O-methoxyethyl-thymidine
  modified_base 6: mod_base = OTHER; note = 2'-O-methoxyethyl-thymidine
  modified_base 7: mod_base = OTHER; note = 2'-O-methoxyethyl-guanosine
  modified_base 8: mod_base = OTHER; note = 2'-O-methoxyethyl-guanosine
  modified_base 9: mod_base = OTHER; note = 2'-O-methoxyethyl-5'-methylcytidine
  modified_base 10: mod_base = OTHER; note = 2'-O-methoxyethyl-adenosine
  modified_base 11: mod_base = OTHER; note = 2'-O-methoxyethyl-guanosine
  modified_base 12: mod_base = OTHER; note = 2'-O-methoxyethyl-adenosine
  modified_base 13: mod_base = OTHER; note = 2'-O-methoxyethyl-adenosine
  modified_base 14: mod_base = OTHER; note = 2'-O-methoxyethyl-adenosine
  modified_base 15: mod_base = OTHER; note = 2'-O-methoxyethyl-thymidine
  modified_base 16: mod_base = OTHER; note = 2'-O-methoxyethyl-guanosine
  modified_base 17: mod_base = OTHER; note = 2'-O-methoxyethyl-guanosine
  modified_base 18: mod_base = OTHER; note = 2'-O-methoxyethyl-5'-methylcytidine
gatcttggcagaaatggc

SEQ ID NO: 600 - RNA, 18 nt, synthetic construct
  source 1..18: mol_type = other RNA
  modified_base 1: mod_base = OTHER; note = 2'-O-methoxyethyl-guanosine
  modified_base 2: mod_base = OTHER; note = 2'-O-methoxyethyl-adenosine
  modified_base 3: mod_base = OTHER; note = 2'-O-methoxyethyl-5'-methylcytidine
  modified_base 4: mod_base = OTHER; note = 2'-O-methoxyethyl-adenosine
  modified_base 5: mod_base = OTHER; note = 2'-O-methoxyethyl-thymidine
  modified_base 6: mod_base = OTHER; note = 2'-O-methoxyethyl-guanosine
  modified_base 7: mod_base = OTHER; note = 2'-O-methoxyethyl-adenosine
  modified_base 8: mod_base = OTHER; note = 2'-O-methoxyethyl-thymidine
  modified_base 9: mod_base = OTHER; note = 2'-O-methoxyethyl-5'-methylcytidine
  modified_base 10: mod_base = OTHER; note = 2'-O-methoxyethyl-thymidine
  modified_base 11: mod_base = OTHER; note = 2'-O-methoxyethyl-thymidine
  modified_base 12: mod_base = OTHER; note = 2'-O-methoxyethyl-guanosine
  modified_base 13: mod_base = OTHER; note = 2'-O-methoxyethyl-guanosine
  modified_base 14: mod_base = OTHER; note = 2'-O-methoxyethyl-5'-methylcytidine
  modified_base 15: mod_base = OTHER; note = 2'-O-methoxyethyl-adenosine
  modified_base 16: mod_base = OTHER; note = 2'-O-methoxyethyl-guanosine
  modified_base 17: mod_base = OTHER; note = 2'-O-methoxyethyl-adenosine
  modified_base 18: mod_base = OTHER; note = 2'-O-methoxyethyl-adenosine
gacatgatcttggcagaa

SEQ ID NO: 601 - RNA, 18 nt, synthetic construct
  source 1..18: mol_type = other RNA
  modified_base 1: mod_base = OTHER; note = 2'-O-methoxyethyl-guanosine
  modified_base 2: mod_base = OTHER; note = 2'-O-methoxyethyl-adenosine
  modified_base 3: mod_base = OTHER; note = 2'-O-methoxyethyl-guanosine
  modified_base 4: mod_base = OTHER; note = 2'-O-methoxyethyl-guanosine
  modified_base 5: mod_base = OTHER; note = 2'-O-methoxyethyl-thymidine
  modified_base 6: mod_base = OTHER; note = 2'-O-methoxyethyl-guanosine
  modified_base 7: mod_base = OTHER; note = 2'-O-methoxyethyl-adenosine
  modified_base 8: mod_base = OTHER; note = 2'-O-methoxyethyl-5'-methylcytidine
  modified_base 9: mod_base = OTHER; note = 2'-O-methoxyethyl-adenosine
  modified_base 10: mod_base = OTHER; note = 2'-O-methoxyethyl-thymidine
  modified_base 11: mod_base = OTHER; note = 2'-O-methoxyethyl-guanosine
  modified_base 12: mod_base = OTHER; note = 2'-O-methoxyethyl-adenosine
  modified_base 13: mod_base = OTHER; note = 2'-O-methoxyethyl-thymidine
  modified_base 14: mod_base = OTHER; note = 2'-O-methoxyethyl-5'-methylcytidine
  modified_base 15: mod_base = OTHER; note = 2'-O-methoxyethyl-thymidine
  modified_base 16: mod_base = OTHER; note = 2'-O-methoxyethyl-thymidine
  modified_base 17: mod_base = OTHER; note = 2'-O-methoxyethyl-guanosine
  modified_base 18: mod_base = OTHER; note = 2'-O-methoxyethyl-guanosine
gaggtgacatgatcttgg

SEQ ID NO: 602 - RNA, 18 nt, synthetic construct
  source 1..18: mol_type = other RNA
  modified_base 1: mod_base = OTHER; note = 2'-O-methoxyethyl-adenosine
  modified_base 2: mod_base = OTHER; note = 2'-O-methoxyethyl-guanosine
  modified_base 3: mod_base = OTHER; note = 2'-O-methoxyethyl-adenosine
  modified_base 4: mod_base = OTHER; note = 2'-O-methoxyethyl-thymidine
  modified_base 5: mod_base = OTHER; note = 2'-O-methoxyethyl-thymidine
  modified_base 6: mod_base = OTHER; note = 2'-O-methoxyethyl-guanosine
  modified_base 7: mod_base = OTHER; note = 2'-O-methoxyethyl-adenosine
  modified_base 8: mod_base = OTHER; note = 2'-O-methoxyethyl-guanosine
  modified_base 9: mod_base = OTHER; note = 2'-O-methoxyethyl-guanosine
  modified_base 10: mod_base = OTHER; note = 2'-O-methoxyethyl-thymidine
  modified_base 11: mod_base = OTHER; note = 2'-O-methoxyethyl-guanosine
  modified_base 12: mod_base = OTHER; note = 2'-O-methoxyethyl-adenosine
  modified_base 13: mod_base = OTHER; note = 2'-O-methoxyethyl-5'-methylcytidine
  modified_base 14: mod_base = OTHER; note = 2'-O-methoxyethyl-adenosine
  modified_base 15: mod_base = OTHER; note = 2'-O-methoxyethyl-thymidine
  modified_base 16: mod_base = OTHER; note = 2'-O-methoxyethyl-guanosine
  modified_base 17: mod_base = OTHER; note = 2'-O-methoxyethyl-adenosine
  modified_base 18: mod_base = OTHER; note = 2'-O-methoxyethyl-thymidine
agattgaggtgacatgat

SEQ ID NO: 603 - RNA, 18 nt, synthetic construct
  source 1..18: mol_type = other RNA
  modified_base 1: mod_base = OTHER; note = 2'-O-methoxyethyl-thymidine
  modified_base 2: mod_base = OTHER; note = 2'-O-methoxyethyl-guanosine
  modified_base 3: mod_base = OTHER; note = 2'-O-methoxyethyl-adenosine
  modified_base 4: mod_base = OTHER; note = 2'-O-methoxyethyl-adenosine
  modified_base 5: mod_base = OTHER; note = 2'-O-methoxyethyl-5'-methylcytidine
  modified_base 6: mod_base = OTHER; note = 2'-O-methoxyethyl-adenosine
  modified_base 7: mod_base = OTHER; note = 2'-O-methoxyethyl-guanosine
  modified_base 8: mod_base = OTHER; note = 2'-O-methoxyethyl-adenosine
  modified_base 9: mod_base = OTHER; note = 2'-O-methoxyethyl-thymidine
  modified_base 10: mod_base = OTHER; note = 2'-O-methoxyethyl-thymidine
  modified_base 11: mod_base = OTHER; note = 2'-O-methoxyethyl-guanosine
  modified_base 12: mod_base = OTHER; note = 2'-O-methoxyethyl-adenosine
  modified_base 13: mod_base = OTHER; note = 2'-O-methoxyethyl-guanosine
  modified_base 14: mod_base = OTHER; note = 2'-O-methoxyethyl-guanosine
  modified_base 15: mod_base = OTHER; note = 2'-O-methoxyethyl-thymidine
  modified_base 16: mod_base = OTHER; note = 2'-O-methoxyethyl-guanosine
  modified_base 17: mod_base = OTHER; note = 2'-O-methoxyethyl-adenosine
  modified_base 18: mod_base = OTHER; note = 2'-O-methoxyethyl-5'-methylcytidine
tgaacagattgaggtgac

SEQ ID NO: 604 - RNA, 18 nt, synthetic construct
  source 1..18: mol_type = other RNA
  modified_base 1: mod_base = OTHER; note = 2'-O-methoxyethyl-guanosine
  modified_base 2: mod_base = OTHER; note = 2'-O-methoxyethyl-thymidine
  modified_base 3: mod_base = OTHER; note = 2'-O-methoxyethyl-5'-methylcytidine
  modified_base 4: mod_base = OTHER; note = 2'-O-methoxyethyl-5'-methylcytidine
  modified_base 5: mod_base = OTHER; note = 2'-O-methoxyethyl-adenosine
  modified_base 6: mod_base = OTHER; note = 2'-O-methoxyethyl-thymidine
  modified_base 7: mod_base = OTHER; note = 2'-O-methoxyethyl-guanosine
  modified_base 8: mod_base = OTHER; note = 2'-O-methoxyethyl-adenosine
  modified_base 9: mod_base = OTHER; note = 2'-O-methoxyethyl-adenosine
  modified_base 10: mod_base = OTHER; note = 2'-O-methoxyethyl-5'-methylcytidine
  modified_base 11: mod_base = OTHER; note = 2'-O-methoxyethyl-adenosine
  modified_base 12: mod_base = OTHER; note = 2'-O-methoxyethyl-guanosine
  modified_base 13: mod_base = OTHER; note = 2'-O-methoxyethyl-adenosine
  modified_base 14: mod_base = OTHER; note = 2'-O-methoxyethyl-thymidine
  modified_base 15: mod_base = OTHER; note = 2'-O-methoxyethyl-thymidine
  modified_base 16: mod_base = OTHER; note = 2'-O-methoxyethyl-guanosine
  modified_base 17: mod_base = OTHER; note = 2'-O-methoxyethyl-adenosine
  modified_base 18: mod_base = OTHER; note = 2'-O-methoxyethyl-guanosine
gtccatgaacagattgag

SEQ ID NO: 605 - RNA, 18 nt, synthetic construct
  source 1..18: mol_type = other RNA
  modified_base 1: mod_base = OTHER; note = 2'-O-methoxyethyl-thymidine
  modified_base 2: mod_base = OTHER; note = 2'-O-methoxyethyl-thymidine
  modified_base 3: mod_base = OTHER; note = 2'-O-methoxyethyl-guanosine
  modified_base 4: mod_base = OTHER; note = 2'-O-methoxyethyl-guanosine
  modified_base 5: mod_base = OTHER; note = 2'-O-methoxyethyl-adenosine
  modified_base 6: mod_base = OTHER; note = 2'-O-methoxyethyl-guanosine
  modified_base 7: mod_base = OTHER; note = 2'-O-methoxyethyl-thymidine
  modified_base 8: mod_base = OTHER; note = 2'-O-methoxyethyl-5'-methylcytidine
  modified_base 9: mod_base = OTHER; note = 2'-O-methoxyethyl-5'-methylcytidine
  modified_base 10: mod_base = OTHER; note = 2'-O-methoxyethyl-adenosine
  modified_base 11: mod_base = OTHER; note = 2'-O-methoxyethyl-thymidine
  modified_base 12: mod_base = OTHER; note = 2'-O-methoxyethyl-guanosine
  modified_base 13: mod_base = OTHER; note = 2'-O-methoxyethyl-adenosine
  modified_base 14: mod_base = OTHER; note = 2'-O-methoxyethyl-adenosine
  modified_base 15: mod_base = OTHER; note = 2'-O-methoxyethyl-5'-methylcytidine
  modified_base 16: mod_base = OTHER; note = 2'-O-methoxyethyl-adenosine
  modified_base 17: mod_base = OTHER; note = 2'-O-methoxyethyl-guanosine
  modified_base 18: mod_base = OTHER; note = 2'-O-methoxyethyl-adenosine
ttggagtccatgaacaga

SEQ ID NO: 606 - RNA, 18 nt, synthetic construct
  source 1..18: mol_type = other RNA
  modified_base 1: mod_base = OTHER; note = 2'-O-methoxyethyl-thymidine
  modified_base 2: mod_base = OTHER; note = 2'-O-methoxyethyl-guanosine
  modified_base 3: mod_base = OTHER; note = 2'-O-methoxyethyl-thymidine
  modified_base 4: mod_base = OTHER; note = 2'-O-methoxyethyl-adenosine
  modified_base 5: mod_base = OTHER; note = 2'-O-methoxyethyl-thymidine
  modified_base 6: mod_base = OTHER; note = 2'-O-methoxyethyl-thymidine
  modified_base 7: mod_base = OTHER; note = 2'-O-methoxyethyl-thymidine
  modified_base 8: mod_base = OTHER; note = 2'-O-methoxyethyl-guanosine
  modified_base 9: mod_base = OTHER; note = 2'-O-methoxyethyl-guanosine
  modified_base 10: mod_base = OTHER; note = 2'-O-methoxyethyl-adenosine
  modified_base 11: mod_base = OTHER; note = 2'-O-methoxyethyl-guanosine
  modified_base 12: mod_base = OTHER; note = 2'-O-methoxyethyl-thymidine
  modified_base 13: mod_base = OTHER; note = 2'-O-methoxyethyl-5'-methylcytidine
  modified_base 14: mod_base = OTHER; note = 2'-O-methoxyethyl-5'-methylcytidine
  modified_base 15: mod_base = OTHER; note = 2'-O-methoxyethyl-adenosine
  modified_base 16: mod_base = OTHER; note = 2'-O-methoxyethyl-thymidine
  modified_base 17: mod_base = OTHER; note = 2'-O-methoxyethyl-guanosine
  modified_base 18: mod_base = OTHER; note = 2'-O-methoxyethyl-adenosine
tgtatttggagtccatga

SEQ ID NO: 607 - RNA, 18 nt, synthetic construct
  source 1..18: mol_type = other RNA
  modified_base 1: mod_base = OTHER; note = 2'-O-methoxyethyl-thymidine
  modified_base 2: mod_base = OTHER; note = 2'-O-methoxyethyl-thymidine
  modified_base 3: mod_base = OTHER; note = 2'-O-methoxyethyl-thymidine
  modified_base 4: mod_base = OTHER; note = 2'-O-methoxyethyl-5'-methylcytidine
  modified_base 5: mod_base = OTHER; note = 2'-O-methoxyethyl-thymidine
  modified_base 6: mod_base = OTHER; note = 2'-O-methoxyethyl-thymidine
  modified_base 7: mod_base = OTHER; note = 2'-O-methoxyethyl-guanosine
  modified_base 8: mod_base = OTHER; note = 2'-O-methoxyethyl-thymidine
  modified_base 9: mod_base = OTHER; note = 2'-O-methoxyethyl-adenosine
  modified_base 10: mod_base = OTHER; note = 2'-O-methoxyethyl-thymidine
  modified_base 11: mod_base = OTHER; note = 2'-O-methoxyethyl-thymidine
  modified_base 12: mod_base = OTHER; note = 2'-O-methoxyethyl-thymidine
  modified_base 13: mod_base = OTHER; note = 2'-O-methoxyethyl-guanosine
  modified_base 14: mod_base = OTHER; note = 2'-O-methoxyethyl-guanosine
  modified_base 15: mod_base = OTHER; note = 2'-O-methoxyethyl-adenosine
  modified_base 16: mod_base = OTHER; note = 2'-O-methoxyethyl-guanosine
  modified_base 17: mod_base = OTHER; note = 2'-O-methoxyethyl-thymidine
  modified_base 18: mod_base = OTHER; note = 2'-O-methoxyethyl-5'-methylcytidine
tttcttgtatttggagtc

SEQ ID NO: 608 - DNA, 16 bp, synthetic construct
  source 1..16: mol_type = other DNA
tctaggcgggcagcac

SEQ ID NO: 609 - DNA, 16 bp, synthetic construct
  source 1..16: mol_type = other DNA
ttctaggcgggcagca

SEQ ID NO: 610 - DNA, 16 bp, synthetic construct
  source 1..16: mol_type = other DNA
tttctaggcgggcagc

SEQ ID NO: 611 - DNA, 16 bp, synthetic construct
  source 1..16: mol_type = other DNA
ctttctaggcgggcag

SEQ ID NO: 612 - DNA, 16 bp, synthetic construct
  source 1..16: mol_type = other DNA
cctttctaggcgggca

SEQ ID NO: 613 - DNA, 16 bp, synthetic construct
  source 1..16: mol_type = other DNA
ccctttctaggcgggc

SEQ ID NO: 614 - DNA, 16 bp, synthetic construct
  source 1..16: mol_type = other DNA
accctttctaggcggg

SEQ ID NO: 615 - DNA, 16 bp, synthetic construct
  source 1..16: mol_type = other DNA
caccctttctaggcgg

SEQ ID NO: 616 - DNA, 16 bp, synthetic construct
  source 1..16: mol_type = other DNA
tcaccctttctaggcg

SEQ ID NO: 617 - DNA, 16 bp, synthetic construct
  source 1..16: mol_type = other DNA
ttcaccctttctaggc

SEQ ID NO: 618 - DNA, 16 bp, synthetic construct
  source 1..16: mol_type = other DNA
cttcaccctttctagg

SEQ ID NO: 619 - DNA, 16 bp, synthetic construct
  source 1..16: mol_type = other DNA
acttcaccctttctag

SEQ ID NO: 620 - DNA, 16 bp, synthetic construct
  source 1..16: mol_type = other DNA
cacttcaccctttcta

SEQ ID NO: 621 - DNA, 16 bp, synthetic construct
  source 1..16: mol_type = other DNA
ccacttcaccctttct

SEQ ID NO: 622 - DNA, 16 bp, synthetic construct
  source 1..16: mol_type = other DNA
accacttcaccctttc

SEQ ID NO: 623 - DNA, 16 bp, synthetic construct
  source 1..16: mol_type = other DNA
aaccacttcacccttt

SEQ ID NO: 624 - DNA, 16 bp, synthetic construct
  source 1..16: mol_type = other DNA
caaccacttcaccctt

SEQ ID NO: 625 - DNA, 16 bp, synthetic construct
  source 1..16: mol_type = other DNA
acaaccacttcaccct

SEQ ID NO: 626 - DNA, 16 bp, synthetic construct
  source 1..16: mol_type = other DNA
aacaaccacttcaccc

SEQ ID NO: 627 - DNA, 16 bp, synthetic construct
  source 1..16: mol_type = other DNA
aaacaaccacttcacc

SEQ ID NO: 628 - DNA, 16 bp, synthetic construct
  source 1..16: mol_type = other DNA
gaaacaaccacttcac

SEQ ID NO: 629 - DNA, 16 bp, synthetic construct
  source 1..16: mol_type = other DNA
ggaaacaaccacttca

SEQ ID NO: 630 - DNA, 16 bp, synthetic construct
  source 1..16: mol_type = other DNA
cggaaacaaccacttc

SEQ ID NO: 631 - DNA, 16 bp, synthetic construct
  source 1..16: mol_type = other DNA
acggaaacaaccactt

SEQ ID NO: 632 - DNA, 16 bp, synthetic construct
  source 1..16: mol_type = other DNA
cacggaaacaaccact

SEQ ID NO: 633 - DNA, 16 bp, synthetic construct
  source 1..16: mol_type = other DNA
tcacggaaacaaccac

SEQ ID NO: 634 - DNA, 16 bp, synthetic construct
  source 1..16: mol_type = other DNA
gtcacggaaacaacca

SEQ ID NO: 635 - DNA, 16 bp, synthetic construct
  source 1..16: mol_type = other DNA
cgtcacggaaacaacc

SEQ ID NO: 636 - DNA, 16 bp, synthetic construct
  source 1..16: mol_type = other DNA
ccgtcacggaaacaac

SEQ ID NO: 637 - DNA, 16 bp, synthetic construct
  source 1..16: mol_type = other DNA
tccgtcacggaaacaa

SEQ ID NO: 638 - DNA, 16 bp, synthetic construct
  source 1..16: mol_type = other DNA
gtccgtcacggaaaca

SEQ ID NO: 639 - DNA, 16 bp, synthetic construct
  source 1..16: mol_type = other DNA
agtccgtcacggaaac

SEQ ID NO: 640 - DNA, 16 bp, synthetic construct
  source 1..16: mol_type = other DNA
cagtccgtcacggaaa

SEQ ID NO: 641 - DNA, 16 bp, synthetic construct
  source 1..16: mol_type = other DNA
tcagtccgtcacggaa

SEQ ID NO: 642 - DNA, 16 bp, synthetic construct
  source 1..16: mol_type = other DNA
ctcagtccgtcacgga

SEQ ID NO: 643 - DNA, 16 bp, synthetic construct
  source 1..16: mol_type = other DNA
actcagtccgtcacgg

SEQ ID NO: 644 - DNA, 16 bp, synthetic construct
  source 1..16: mol_type = other DNA
tactcagtccgtcacg

SEQ ID NO: 645 - DNA, 16 bp, synthetic construct
  source 1..16: mol_type = other DNA
gtactcagtccgtcac

SEQ ID NO: 646 - DNA, 16 bp, synthetic construct
  source 1..16: mol_type = other DNA
cgtactcagtccgtca

SEQ ID NO: 647 - DNA, 16 bp, synthetic construct
  source 1..16: mol_type = other DNA
ccgtactcagtccgtc

SEQ ID NO: 648 - DNA, 16 bp, synthetic construct
  source 1..16: mol_type = other DNA
cccgtactcagtccgt

SEQ ID NO: 649 - DNA, 16 bp, synthetic construct
  source 1..16: mol_type = other DNA
acccgtactcagtccg

SEQ ID NO: 650 - DNA, 16 bp, synthetic construct
  source 1..16: mol_type = other DNA
cacccgtactcagtcc

SEQ ID NO: 651 - DNA, 16 bp, synthetic construct
  source 1..16: mol_type = other DNA
gcacccgtactcagtc

SEQ ID NO: 652 - DNA, 16 bp, synthetic construct
  source 1..16: mol_type = other DNA
ggcacccgtactcagt

SEQ ID NO: 653 - DNA, 16 bp, synthetic construct
  source 1..16: mol_type = other DNA
aggcacccgtactcag

SEQ ID NO: 654 - DNA, 16 bp, synthetic construct
  source 1..16: mol_type = other DNA
caggcacccgtactca

SEQ ID NO: 655 - DNA, 16 bp, synthetic construct
  source 1..16: mol_type = other DNA
acaggcacccgtactc

SEQ ID NO: 656 - DNA, 16 bp, synthetic construct
  source 1..16: mol_type = other DNA
gacaggcacccgtact

SEQ ID NO: 657 - DNA, 16 bp, synthetic construct
  source 1..16: mol_type = other DNA
tgacaggcacccgtac

SEQ ID NO: 658 - DNA, 16 bp, synthetic construct
  source 1..16: mol_type = other DNA
ctgacaggcacccgta

SEQ ID NO: 659 - DNA, 16 bp, synthetic construct
  source 1..16: mol_type = other DNA
cctgacaggcacccgt

SEQ ID NO: 660 - DNA, 16 bp, synthetic construct
  source 1..16: mol_type = other DNA
gcctgacaggcacccg

SEQ ID NO: 661 - DNA, 16 bp, synthetic construct
  source 1..16: mol_type = other DNA
agcctgacaggcaccc

SEQ ID NO: 662 - DNA, 16 bp, synthetic construct
  source 1..16: mol_type = other DNA
gagcctgacaggcacc

SEQ ID NO: 663 - DNA, 16 bp, synthetic construct
  source 1..16: mol_type = other DNA
agagcctgacaggcac

SEQ ID NO: 664 - DNA, 16 bp, synthetic construct
  source 1..16: mol_type = other DNA
aagagcctgacaggca

SEQ ID NO: 665 - DNA, 16 bp, synthetic construct
  source 1..16: mol_type = other DNA
caagagcctgacaggc

SEQ ID NO: 666 - DNA, 16 bp, synthetic construct
  source 1..16: mol_type = other DNA
gcaagagcctgacagg

SEQ ID NO: 667 - DNA, 16 bp, synthetic construct
  source 1..16: mol_type = other DNA
cgcaagagcctgacag

SEQ ID NO: 668 - DNA, 16 bp, synthetic construct
  source 1..16: mol_type = other DNA
ccgcaagagcctgaca

SEQ ID NO: 669 - DNA, 16 bp, synthetic construct
  source 1..16: mol_type = other DNA
tccgcaagagcctgac

SEQ ID NO: 670 - DNA, 16 bp, synthetic construct
  source 1..16: mol_type = other DNA
ttccgcaagagcctga

SEQ ID NO: 671 - DNA, 16 bp, synthetic construct
  source 1..16: mol_type = other DNA
cttccgcaagagcctg

SEQ ID NO: 672 - DNA, 16 bp, synthetic construct
  source 1..16: mol_type = other DNA
acttccgcaagagcct

SEQ ID NO: 673 - DNA, 16 bp, synthetic construct
  source 1..16: mol_type = other DNA
gacttccgcaagagcc

SEQ ID NO: 674 - DNA, 16 bp, synthetic construct
  source 1..16: mol_type = other DNA
ggacttccgcaagagc

SEQ ID NO: 675 - DNA, 16 bp, synthetic construct
  source 1..16: mol_type = other DNA
tggacttccgcaagag

SEQ ID NO: 676 - DNA, 16 bp, synthetic construct
  source 1..16: mol_type = other DNA
atggacttccgcaaga

SEQ ID NO: 677 - DNA, 16 bp, synthetic construct
  source 1..16: mol_type = other DNA
catggacttccgcaag

SEQ ID NO: 678 - DNA, 16 bp, synthetic construct
  source 1..16: mol_type = other DNA
gcatggacttccgcaa

SEQ ID NO: 679 - DNA, 16 bp, synthetic construct
  source 1..16: mol_type = other DNA
cgcatggacttccgca

SEQ ID NO: 680 - DNA, 16 bp, synthetic construct
  source 1..16: mol_type = other DNA
gcgcatggacttccgc

SEQ ID NO: 681 - DNA, 16 bp, synthetic construct
  source 1..16: mol_type = other DNA
ggcgcatggacttccg

SEQ ID NO: 682 - DNA, 16 bp, synthetic construct
  source 1..16: mol_type = other DNA
tggcgcatggacttcc

SEQ ID NO: 683 - DNA, 16 bp, synthetic construct
  source 1..16: mol_type = other DNA
atggcgcatggacttc

SEQ ID NO: 684 - DNA, 16 bp, synthetic construct
  source 1..16: mol_type = other DNA
aatggcgcatggactt

SEQ ID NO: 685 - DNA, 16 bp, synthetic construct
  source 1..16: mol_type = other DNA
caatggcgcatggact

SEQ ID NO: 686 - DNA, 16 bp, synthetic construct
  source 1..16: mol_type = other DNA
ccaatggcgcatggac

SEQ ID NO: 687 - DNA, 16 bp, synthetic construct
  source 1..16: mol_type = other DNA
cccaatggcgcatgga

SEQ ID NO: 688 - DNA, 16 bp, synthetic construct
  source 1..16: mol_type = other DNA
tcccaatggcgcatgg

SEQ ID NO: 689 - DNA, 16 bp, synthetic construct
  source 1..16: mol_type = other DNA
ctcccaatggcgcatg

SEQ ID NO: 690 - DNA, 16 bp, synthetic construct
  source 1..16: mol_type = other DNA
cctcccaatggcgcat

SEQ ID NO: 691 - DNA, 16 bp, synthetic construct
  source 1..16: mol_type = other DNA
ccctcccaatggcgca

SEQ ID NO: 692 - DNA, 16 bp, synthetic construct
  source 1..16: mol_type = other DNA
gccctcccaatggcgc

SEQ ID NO: 693 - DNA, 16 bp, synthetic construct
  source 1..16: mol_type = other DNA
ggccctcccaatggcg

SEQ ID NO: 694 - DNA, 16 bp, synthetic construct
  source 1..16: mol_type = other DNA
aggccctcccaatggc

SEQ ID NO: 695 - DNA, 16 bp, synthetic construct
  source 1..16: mol_type = other DNA
gaggccctcccaatgg

SEQ ID NO: 696 - DNA, 16 bp, synthetic construct
  source 1..16: mol_type = other DNA
cgaggccctcccaatg

SEQ ID NO: 697 - DNA, 16 bp, synthetic construct
  source 1..16: mol_type = other DNA
ccgaggccctcccaat

SEQ ID NO: 698 - DNA, 16 bp, synthetic construct
  source 1..16: mol_type = other DNA
gccgaggccctcccaa

SEQ ID NO: 699 - DNA, 16 bp, synthetic construct
  source 1..16: mol_type = other DNA
ggccgaggccctccca

SEQ ID NO: 700 - DNA, 16 bp, synthetic construct
  source 1..16: mol_type = other DNA
cggccgaggccctccc

SEQ ID NO: 701 - DNA, 16 bp, synthetic construct
  source 1..16: mol_type = other DNA
gcggccgaggccctcc

SEQ ID NO: 702 - DNA, 16 bp, synthetic construct
  source 1..16: mol_type = other DNA
cgcggccgaggccctc

SEQ ID NO: 703 - DNA, 16 bp, synthetic construct
  source 1..16: mol_type = other DNA
ccgcggccgaggccct

SEQ ID NO: 704 - DNA, 16 bp, synthetic construct
  source 1..16: mol_type = other DNA
gccgcggccgaggccc

SEQ ID NO: 705 - DNA, 16 bp, synthetic construct
  source 1..16: mol_type = other DNA
agccgcggccgaggcc

SEQ ID NO: 706 - DNA, 16 bp, synthetic construct
  source 1..16: mol_type = other DNA
gagccgcggccgaggc

SEQ ID NO: 707 - DNA, 16 bp, synthetic construct
  source 1..16: mol_type = other DNA
agagccgcggccgagg

SEQ ID NO: 708 - DNA, 16 bp, synthetic construct
  source 1..16: mol_type = other DNA
cagagccgcggccgag

SEQ ID NO: 709 - DNA, 16 bp, synthetic construct
  source 1..16: mol_type = other DNA
acagagccgcggccga

SEQ ID NO: 710 - DNA, 16 bp, synthetic construct
  source 1..16: mol_type = other DNA
cacagagccgcggccg

SEQ ID NO: 711 - DNA, 16 bp, synthetic construct
  source 1..16: mol_type = other DNA
gcacagagccgcggcc

SEQ ID NO: 712 - DNA, 16 bp, synthetic construct
  source 1..16: mol_type = other DNA
ggcacagagccgcggc

SEQ ID NO: 713 - DNA, 16 bp, synthetic construct
  source 1..16: mol_type = other DNA
gggcacagagccgcgg

SEQ ID NO: 714 - DNA, 16 bp, synthetic construct
  source 1..16: mol_type = other DNA
agggcacagagccgcg

SEQ ID NO: 715 - DNA, 16 bp, synthetic construct
  source 1..16: mol_type = other DNA
aagggcacagagccgc

SEQ ID NO: 716 - DNA, 16 bp, synthetic construct
  source 1..16: mol_type = other DNA
caagggcacagagccg

SEQ ID NO: 717 - DNA, 16 bp, synthetic construct
  source 1..16: mol_type = other DNA
gcaagggcacagagcc

SEQ ID NO: 718 - DNA, 16 bp, synthetic construct
  source 1..16: mol_type = other DNA
agcaagggcacagagc

SEQ ID NO: 719 - DNA, 16 bp, synthetic construct
  source 1..16: mol_type = other DNA
cagcaagggcacagag

SEQ ID NO: 720 - DNA, 16 bp, synthetic construct
  source 1..16: mol_type = other DNA
gcagcaagggcacaga

SEQ ID NO: 721 - DNA, 16 bp, synthetic construct
  source 1..16: mol_type = other DNA
agcagcaagggcacag

SEQ ID NO: 722 - DNA, 16 bp, synthetic construct
  source 1..16: mol_type = other DNA
cagcagcaagggcaca

SEQ ID NO: 723 - DNA, 16 bp, synthetic construct
  source 1..16: mol_type = other DNA
tcagcagcaagggcac

SEQ ID NO: 724 - DNA, 16 bp, synthetic construct
  source 1..16: mol_type = other DNA
ctcagcagcaagggca

SEQ ID NO: 725 - DNA, 16 bp, synthetic construct
  source 1..16: mol_type = other DNA
cctcagcagcaagggc

SEQ ID NO: 726 - DNA, 16 bp, synthetic construct
  source 1..16: mol_type = other DNA
ccctcagcagcaaggg

SEQ ID NO: 727 - DNA, 16 bp, synthetic construct
  source 1..16: mol_type = other DNA
gccctcagcagcaagg

SEQ ID NO: 728 - DNA, 16 bp, synthetic construct
  source 1..16: mol_type = other DNA
ggccctcagcagcaag

SEQ ID NO: 729 - DNA, 16 bp, synthetic construct
  source 1..16: mol_type = other DNA
tggccctcagcagcaa

SEQ ID NO: 730 - DNA, 16 bp, synthetic construct
  source 1..16: mol_type = other DNA
gtggccctcagcagca

SEQ ID NO: 731 - DNA, 16 bp, synthetic construct
  source 1..16: mol_type = other DNA
agtggccctcagcagc

SEQ ID NO: 732 - DNA, 16 bp, synthetic construct
  source 1..16: mol_type = other DNA
aagtggccctcagcag

SEQ ID NO: 733 - DNA, 16 bp, synthetic construct
  source 1..16: mol_type = other DNA
gaagtggccctcagca

SEQ ID NO: 734 - DNA, 16 bp, synthetic construct
  source 1..16: mol_type = other DNA
ggaagtggccctcagc

SEQ ID NO: 735 - DNA, 16 bp, synthetic construct
  source 1..16: mol_type = other DNA
aggaagtggccctcag

SEQ ID NO: 736 - DNA, 16 bp, synthetic construct
  source 1..16: mol_type = other DNA
caggaagtggccctca

SEQ ID NO: 737 - DNA, 16 bp, synthetic construct
  source 1..16: mol_type = other DNA
ccaggaagtggccctc

SEQ ID NO: 738 - DNA, 16 bp, synthetic construct
  source 1..16: mol_type = other DNA
cccaggaagtggccct

SEQ ID NO: 739 - DNA, 16 bp, synthetic construct
  source 1..16: mol_type = other DNA
acccaggaagtggccc

SEQ ID NO: 740 - DNA, 16 bp, synthetic construct
  source 1..16: mol_type = other DNA
gacccaggaagtggcc

SEQ ID NO: 741 - DNA, 16 bp, synthetic construct
  source 1..16: mol_type = other DNA
tgacccaggaagtggc

SEQ ID NO: 742 - DNA, 16 bp, synthetic construct
  source 1..16: mol_type = other DNA
atgacccaggaagtgg

SEQ ID NO: 743 - DNA, 16 bp, synthetic construct
  source 1..16: mol_type = other DNA
aatgacccaggaagtg

SEQ ID NO: 744 - DNA, 16 bp, synthetic construct
  source 1..16: mol_type = other DNA
gaatgacccaggaagt

SEQ ID NO: 745 - DNA, 16 bp, synthetic construct
  source 1..16: mol_type = other DNA
ggaatgacccaggaag

SEQ ID NO: 746 - DNA, 16 bp, synthetic construct
  source 1..16: mol_type = other DNA
aggaatgacccaggaa

SEQ ID NO: 747 - DNA, 16 bp, synthetic construct
  source 1..16: mol_type = other DNA
caggaatgacccagga

SEQ ID NO: 748 - DNA, 16 bp, synthetic construct
  source 1..16: mol_type = other DNA
ccaggaatgacccagg

SEQ ID NO: 749 - DNA, 16 bp, synthetic construct
  source 1..16: mol_type = other DNA
tccaggaatgacccag

SEQ ID NO: 750 - DNA, 16 bp, synthetic construct
  source 1..16: mol_type = other DNA
gtccaggaatgaccca

SEQ ID NO: 751 - DNA, 16 bp, synthetic construct
  source 1..16: mol_type = other DNA
ggtccaggaatgaccc

SEQ ID NO: 752 - DNA, 16 bp, synthetic construct
  source 1..16: mol_type = other DNA
cggtccaggaatgacc

SEQ ID NO: 753 - DNA, 16 bp, synthetic construct
  source 1..16: mol_type = other DNA
ccggtccaggaatgac

SEQ ID NO: 754 - DNA, 16 bp, synthetic construct
  source 1..16: mol_type = other DNA
cccggtccaggaatga

SEQ ID NO: 755 - DNA, 16 bp, synthetic construct
  source 1..16: mol_type = other DNA
tcccggtccaggaatg

SEQ ID NO: 756 - DNA, 16 bp, synthetic construct
  source 1..16: mol_type = other DNA
ctcccggtccaggaat

SEQ ID NO: 757 - DNA, 16 bp, synthetic construct
  source 1..16: mol_type = other DNA
gctcccggtccaggaa

SEQ ID NO: 758 - DNA, 16 bp, synthetic construct
  source 1..16: mol_type = other DNA
ggctcccggtccagga

SEQ ID NO: 759 - DNA, 16 bp, synthetic construct
  source 1..16: mol_type = other DNA
cggctcccggtccagg

SEQ ID NO: 760 - DNA, 16 bp, synthetic construct
  source 1..16: mol_type = other DNA
ccggctcccggtccag

SEQ ID NO: 761 - DNA, 16 bp, synthetic construct
  source 1..16: mol_type = other DNA
cccggctcccggtcca

SEQ ID NO: 762 - DNA, 16 bp, synthetic construct
  source 1..16: mol_type = other DNA
gcccggctcccggtcc

SEQ ID NO: 763 - DNA, 16 bp, synthetic construct
  source 1..16: mol_type = other DNA
agcccggctcccggtc

SEQ ID NO: 764 - DNA, 16 bp, synthetic construct
  source 1..16: mol_type = other DNA
cagcccggctcccggt

SEQ ID NO: 765 - DNA, 16 bp, synthetic construct
  source 1..16: mol_type = other DNA
ccagcccggctcccgg

SEQ ID NO: 766 - DNA, 16 bp, synthetic construct
  source 1..16: mol_type = other DNA
cccagcccggctcccg

SEQ ID NO: 767 - DNA, 16 bp, synthetic construct
  source 1..16: mol_type = other DNA
ccccagcccggctccc

SEQ ID NO: 768 - DNA, 16 bp, synthetic construct
  source 1..16: mol_type = other DNA
gccccagcccggctcc

SEQ ID NO: 769 - DNA, 16 bp, synthetic construct
  source 1..16: mol_type = other DNA
agccccagcccggctc

SEQ ID NO: 770 - DNA, 16 bp, synthetic construct
  source 1..16: mol_type = other DNA
gagccccagcccggct

SEQ ID NO: 771 - DNA, 16 bp, synthetic construct
  source 1..16: mol_type = other DNA
tgagccccagcccggc

SEQ ID NO: 772 - DNA, 16 bp, synthetic construct
  source 1..16: mol_type = other DNA
gtgagccccagcccgg

SEQ ID NO: 773 - DNA, 16 bp, synthetic construct
  source 1..16: mol_type = other DNA
tgtgagccccagcccg

SEQ ID NO: 774 - DNA, 16 bp, synthetic construct
  source 1..16: mol_type = other DNA
gtgtgagccccagccc

SEQ ID NO: 775 - DNA, 16 bp, synthetic construct
  source 1..16: mol_type = other DNA
cgtgtgagccccagcc

SEQ ID NO: 776 - DNA, 16 bp, synthetic construct
  source 1..16: mol_type = other DNA
ccgtgtgagccccagc

SEQ ID NO: 777 - DNA, 16 bp, synthetic construct
  source 1..16: mol_type = other DNA
cccgtgtgagccccag

SEQ ID NO: 778 - DNA, 16 bp, synthetic construct
  source 1..16: mol_type = other DNA
ccccgtgtgagcccca

SEQ ID NO: 779 - DNA, 16 bp, synthetic construct
  source 1..16: mol_type = other DNA
cccccgtgtgagcccc

SEQ ID NO: 780 - DNA, 16 bp, synthetic construct
  source 1..16: mol_type = other DNA
gcccccgtgtgagccc

SEQ ID NO: 781 - DNA, 16 bp, synthetic construct
  source 1..16: mol_type = other DNA
agcccccgtgtgagcc

SEQ ID NO: 782 - DNA, 16 bp, synthetic construct
  source 1..16: mol_type = other DNA
gagcccccgtgtgagc

SEQ ID NO: 783 - DNA, 16 bp, synthetic construct
  source 1..16: mol_type = other DNA
ggagcccccgtgtgag

SEQ ID NO: 784 - DNA, 16 bp, synthetic construct
  source 1..16: mol_type = other DNA
gggagcccccgtgtga

SEQ ID NO: 785 - DNA, 16 bp, synthetic construct
  source 1..16: mol_type = other DNA
cgggagcccccgtgtg

SEQ ID NO: 786 - DNA, 16 bp, synthetic construct
  source 1..16: mol_type = other DNA
gcgggagcccccgtgt

SEQ ID NO: 787 - DNA, 16 bp, synthetic construct
  source 1..16: mol_type = other DNA
cgcgggagcccccgtg

SEQ ID NO: 788 - DNA, 16 bp, synthetic construct
  source 1..16: mol_type = other DNA
acgcgggagcccccgt

SEQ ID NO: 789 - DNA, 16 bp, synthetic construct
  source 1..16: mol_type = other DNA
cacgcgggagcccccg

SEQ ID NO: 790 - DNA, 16 bp, synthetic construct
  source 1..16: mol_type = other DNA
ccacgcgggagccccc

SEQ ID NO: 791 - DNA, 16 bp, synthetic construct
  source 1..16: mol_type = other DNA
gccacgcgggagcccc

SEQ ID NO: 792 - DNA, 16 bp, synthetic construct
  source 1..16: mol_type = other DNA
ggccacgcgggagccc

SEQ ID NO: 793 - DNA, 16 bp, synthetic construct
  source 1..16: mol_type = other DNA
cggccacgcgggagcc

SEQ ID NO: 794 - DNA, 16 bp, synthetic construct
  source 1..16: mol_type = other DNA
acggccacgcgggagc

SEQ ID NO: 795 - DNA, 16 bp, synthetic construct
  source 1..16: mol_type = other DNA
gacggccacgcgggag

SEQ ID NO: 796 - DNA, 16 bp, synthetic construct
  source 1..16: mol_type = other DNA
agacggccacgcggga

SEQ ID NO: 797 - DNA, 16 bp, synthetic construct
  source 1..16: mol_type = other DNA
gagacggccacgcggg

SEQ ID NO: 798 - DNA, 16 bp, synthetic construct
  source 1..16: mol_type = other DNA
cgagacggccacgcgg

SEQ ID NO: 799 - DNA, 16 bp, synthetic construct
  source 1..16: mol_type = other DNA
ccgagacggccacgcg

SEQ ID NO: 800 - DNA, 16 bp, synthetic construct
  source 1..16: mol_type = other DNA
gccgagacggccacgc

SEQ ID NO: 801 - DNA, 16 bp, synthetic construct
  source 1..16: mol_type = other DNA
cgccgagacggccacg

SEQ ID NO: 802 - DNA, 16 bp, synthetic construct
  source 1..16: mol_type = other DNA
gcgccgagacggccac

SEQ ID NO: 803 - DNA, 16 bp, synthetic construct
  source 1..16: mol_type = other DNA
ggcgccgagacggcca

SEQ ID NO: 804 - DNA, 16 bp, synthetic construct
  source 1..16: mol_type = other DNA
aggcgccgagacggcc

SEQ ID NO: 805 - DNA, 16 bp, synthetic construct
  source 1..16: mol_type = other DNA
caggcgccgagacggc

SEQ ID NO: 806 - DNA, 16 bp, synthetic construct
  source 1..16: mol_type = other DNA
gcaggcgccgagacgg

SEQ ID NO: 807 - DNA, 16 bp, synthetic construct
  source 1..16: mol_type = other DNA
cgcaggcgccgagacg

SEQ ID NO: 808 - DNA, 16 bp, synthetic construct
  source 1..16: mol_type = other DNA
acgcaggcgccgagac

SEQ ID NO: 809 - DNA, 16 bp, synthetic construct
  source 1..16: mol_type = other DNA
cacgcaggcgccgaga

SEQ ID NO: 810 - DNA, 16 bp, synthetic construct
  source 1..16: mol_type = other DNA
tcacgcaggcgccgag

SEQ ID NO: 811 - DNA, 16 bp, synthetic construct
  source 1..16: mol_type = other DNA
gtcacgcaggcgccga

SEQ ID NO: 812 - DNA, 16 bp, synthetic construct
  source 1..16: mol_type = other DNA
ggtcacgcaggcgccg

SEQ ID NO: 813 - DNA, 16 bp, synthetic construct
  source 1..16: mol_type = other DNA
aggtcacgcaggcgcc

SEQ ID NO: 814 - DNA, 16 bp, synthetic construct
  source 1..16: mol_type = other DNA
gaggtcacgcaggcgc

SEQ ID NO: 815 - DNA, 16 bp, synthetic construct
  source 1..16: mol_type = other DNA
ggaggtcacgcaggcg

SEQ ID NO: 816 - DNA, 16 bp, synthetic construct
  source 1..16: mol_type = other DNA
gggaggtcacgcaggc

SEQ ID NO: 817 - DNA, 16 bp, synthetic construct
  source 1..16: mol_type = other DNA
ggggaggtcacgcagg

SEQ ID NO: 818 - DNA, 16 bp, synthetic construct
  source 1..16: mol_type = other DNA
cggggaggtcacgcag

SEQ ID NO: 819 - DNA, 16 bp, synthetic construct
  source 1..16: mol_type = other DNA
gcggggaggtcacgca

SEQ ID NO: 820 - DNA, 16 bp, synthetic construct
  source 1..16: mol_type = other DNA
ggcggggaggtcacgc

SEQ ID NO: 821 - DNA, 16 bp, synthetic construct
  source 1..16: mol_type = other DNA
cggcggggaggtcacg

SEQ ID NO: 822 - DNA, 16 bp, synthetic construct
  source 1..16: mol_type = other DNA
ccggcggggaggtcac

SEQ ID NO: 823 - DNA, 16 bp, synthetic construct
  source 1..16: mol_type = other DNA
gccggcggggaggtca

SEQ ID NO: 824 - DNA, 16 bp, synthetic construct
  source 1..16: mol_type = other DNA
cgccggcggggaggtc

SEQ ID NO: 825 - DNA, 16 bp, synthetic construct
  source 1..16: mol_type = other DNA
ccgccggcggggaggt

SEQ ID NO: 826 - DNA, 16 bp, synthetic construct
  source 1..16: mol_type = other DNA
cccgccggcggggagg

SEQ ID NO: 827 - DNA, 18 bp, synthetic construct
  source 1..18: mol_type = other DNA
tttctaggcgggcagcac

SEQ ID NO: 828 - DNA, 18 bp, synthetic construct
  source 1..18: mol_type = other DNA
ctttctaggcgggcagca

SEQ ID NO: 829 - DNA, 18 bp, synthetic construct
  source 1..18: mol_type = other DNA
cctttctaggcgggcagc

SEQ ID NO: 830 - DNA, 18 bp, synthetic construct
  source 1..18: mol_type = other DNA
ccctttctaggcgggcag

SEQ ID NO: 831 - DNA, 18 bp, synthetic construct
  source 1..18: mol_type = other DNA
accctttctaggcgggca

SEQ ID NO: 832 - DNA, 18 bp, synthetic construct
  source 1..18: mol_type = other DNA
caccctttctaggcgggc

SEQ ID NO: 833 - DNA, 18 bp, synthetic construct
  source 1..18: mol_type = other DNA
tcaccctttctaggcggg

SEQ ID NO: 834 - DNA, 18 bp, synthetic construct
  source 1..18: mol_type = other DNA
ttcaccctttctaggcgg

SEQ ID NO: 835 - DNA, 18 bp, synthetic construct
  source 1..18: mol_type = other DNA
cttcaccctttctaggcg

SEQ ID NO: 836 - DNA, 18 bp, synthetic construct
  source 1..18: mol_type = other DNA
acttcaccctttctaggc

SEQ ID NO: 837 - DNA, 18 bp, synthetic construct
  source 1..18: mol_type = other DNA
cacttcaccctttctagg

SEQ ID NO: 838 - DNA, 18 bp, synthetic construct
  source 1..18: mol_type = other DNA
ccacttcaccctttctag

SEQ ID NO: 839 - DNA, 18 bp, synthetic construct
  source 1..18: mol_type = other DNA
accacttcaccctttcta

SEQ ID NO: 840 - DNA, 18 bp, synthetic construct
  source 1..18: mol_type = other DNA
aaccacttcaccctttct

SEQ ID NO: 841 - DNA, 18 bp, synthetic construct
  source 1..18: mol_type = other DNA
caaccacttcaccctttc

SEQ ID NO: 842 - DNA, 18 bp, synthetic construct
  source 1..18: mol_type = other DNA
acaaccacttcacccttt

SEQ ID NO: 843 - DNA, 18 bp, synthetic construct
  source 1..18: mol_type = other DNA
aacaaccacttcaccctt

SEQ ID NO: 844 - DNA, 18 bp, synthetic construct
  source 1..18: mol_type = other DNA
aaacaaccacttcaccct

SEQ ID NO: 845 - DNA, 18 bp, synthetic construct
  source 1..18: mol_type = other DNA
gaaacaaccacttcaccc

SEQ ID NO: 846 - DNA, 18 bp, synthetic construct
  source 1..18: mol_type = other DNA
ggaaacaaccacttcacc

SEQ ID NO: 847 - DNA, 18 bp, synthetic construct
  source 1..18: mol_type = other DNA
cggaaacaaccacttcac

SEQ ID NO: 848 - DNA, 18 bp, synthetic construct
  source 1..18: mol_type = other DNA
acggaaacaaccacttca

SEQ ID NO: 849 - DNA, 18 bp, synthetic construct
  source 1..18: mol_type = other DNA
cacggaaacaaccacttc

SEQ ID NO: 850 - DNA, 18 bp, synthetic construct
  source 1..18: mol_type = other DNA
tcacggaaacaaccactt

SEQ ID NO: 851 - DNA, 18 bp, synthetic construct
  source 1..18: mol_type = other DNA
gtcacggaaacaaccact

SEQ ID NO: 852 - DNA, 18 bp, synthetic construct
  source 1..18: mol_type = other DNA
cgtcacggaaacaaccac

SEQ ID NO: 853 - DNA, 18 bp, synthetic construct
  source 1..18: mol_type = other DNA
ccgtcacggaaacaacca

SEQ ID NO: 854 - DNA, 18 bp, synthetic construct
  source 1..18: mol_type = other DNA
tccgtcacggaaacaacc

SEQ ID NO: 855 - DNA, 18 bp, synthetic construct
  source 1..18: mol_type = other DNA
gtccgtcacggaaacaac

SEQ ID NO: 856 - DNA, 18 bp, synthetic construct
  source 1..18: mol_type = other DNA
agtccgtcacggaaacaa

SEQ ID NO: 857 - DNA, 18 bp, synthetic construct
  source 1..18: mol_type = other DNA
cagtccgtcacggaaaca

SEQ ID NO: 858 - DNA, 18 bp, synthetic construct
  source 1..18: mol_type = other DNA
tcagtccgtcacggaaac

SEQ ID NO: 859 - DNA, 18 bp, synthetic construct
  source 1..18: mol_type = other DNA
ctcagtccgtcacggaaa

SEQ ID NO: 860 - DNA, 18 bp, synthetic construct
  source 1..18: mol_type = other DNA
actcagtccgtcacggaa

SEQ ID NO: 861 - DNA, 18 bp, synthetic construct
  source 1..18: mol_type = other DNA
tactcagtccgtcacgga

SEQ ID NO: 862 - DNA, 18 bp, synthetic construct
  source 1..18: mol_type = other DNA
gtactcagtccgtcacgg

SEQ ID NO: 863 - DNA, 18 bp, synthetic construct
  source 1..18: mol_type = other DNA
cgtactcagtccgtcacg

SEQ ID NO: 864 - DNA, 18 bp, synthetic construct
  source 1..18: mol_type = other DNA
ccgtactcagtccgtcac

SEQ ID NO: 865 - DNA, 18 bp, synthetic construct
  source 1..18: mol_type = other DNA
cccgtactcagtccgtca

SEQ ID NO: 866 - DNA, 18 bp, synthetic construct
  source 1..18: mol_type = other DNA
acccgtactcagtccgtc

SEQ ID NO: 867 - DNA, 18 bp, synthetic construct
  source 1..18: mol_type = other DNA
cacccgtactcagtccgt

SEQ ID NO: 868 - DNA, 18 bp, synthetic construct
  source 1..18: mol_type = other DNA
gcacccgtactcagtccg

SEQ ID NO: 869 - DNA, 18 bp, synthetic construct
  source 1..18: mol_type = other DNA
ggcacccgtactcagtcc

SEQ ID NO: 870 - DNA, 18 bp, synthetic construct
  source 1..18: mol_type = other DNA
aggcacccgtactcagtc

SEQ ID NO: 871 - DNA, 18 bp, synthetic construct
  source 1..18: mol_type = other DNA
caggcacccgtactcagt

SEQ ID NO: 872 - DNA, 18 bp, synthetic construct
  source 1..18: mol_type = other DNA
acaggcacccgtactcag

SEQ ID NO: 873 - DNA, 18 bp, synthetic construct
  source 1..18: mol_type = other DNA
gacaggcacccgtactca

SEQ ID NO: 874 - DNA, 18 bp, synthetic construct
  source 1..18: mol_type = other DNA
tgacaggcacccgtactc

SEQ ID NO: 875 - DNA, 18 bp, synthetic construct
  source 1..18: mol_type = other DNA
ctgacaggcacccgtact

SEQ ID NO: 876 - DNA, 18 bp, synthetic construct
  source 1..18: mol_type = other DNA
cctgacaggcacccgtac

SEQ ID NO: 877 - DNA, 18 bp, synthetic construct
  source 1..18: mol_type = other DNA
gcctgacaggcacccgta

SEQ ID NO: 878 - DNA, 18 bp, synthetic construct
  source 1..18: mol_type = other DNA
agcctgacaggcacccgt

SEQ ID NO: 879 - DNA, 18 bp, synthetic construct
  source 1..18: mol_type = other DNA
gagcctgacaggcacccg

SEQ ID NO: 880 - DNA, 18 bp, synthetic construct
  source 1..18: mol_type = other DNA
agagcctgacaggcaccc

SEQ ID NO: 881 - DNA, 18 bp, synthetic construct
  source 1..18: mol_type = other DNA
aagagcctgacaggcacc

SEQ ID NO: 882 - DNA, 18 bp, synthetic construct
  source 1..18: mol_type = other DNA
caagagcctgacaggcac

SEQ ID NO: 883 - DNA, 18 bp, synthetic construct
  source 1..18: mol_type = other DNA
gcaagagcctgacaggca

SEQ ID NO: 884 - DNA, 18 bp, synthetic construct
  source 1..18: mol_type = other DNA
cgcaagagcctgacaggc

SEQ ID NO: 885 - DNA, 18 bp, synthetic construct
  source 1..18: mol_type = other DNA
ccgcaagagcctgacagg

SEQ ID NO: 886 - DNA, 18 bp, synthetic construct
  source 1..18: mol_type = other DNA
tccgcaagagcctgacag

SEQ ID NO: 887 - DNA, 18 bp, synthetic construct
  source 1..18: mol_type = other DNA
ttccgcaagagcctgaca

SEQ ID NO: 888 - DNA, 18 bp, synthetic construct
  source 1..18: mol_type = other DNA
cttccgcaagagcctgac

SEQ ID NO: 889 - DNA, 18 bp, synthetic construct
  source 1..18: mol_type = other DNA
acttccgcaagagcctga

SEQ ID NO: 890 - DNA, 18 bp, synthetic construct
  source 1..18: mol_type = other DNA
gacttccgcaagagcctg

SEQ ID NO: 891 - DNA, 18 bp, synthetic construct
  source 1..18: mol_type = other DNA
ggacttccgcaagagcct

SEQ ID NO: 892 - DNA, 18 bp, synthetic construct
  source 1..18: mol_type = other DNA
tggacttccgcaagagcc

SEQ ID NO: 893 - DNA, 18 bp, synthetic construct
  source 1..18: mol_type = other DNA
atggacttccgcaagagc

SEQ ID NO: 894 - DNA, 18 bp, synthetic construct
  source 1..18: mol_type = other DNA
catggacttccgcaagag

SEQ ID NO: 895 - DNA, 18 bp, synthetic construct
  source 1..18: mol_type = other DNA
gcatggacttccgcaaga

SEQ ID NO: 896 - DNA, 18 bp, synthetic construct
  source 1..18: mol_type = other DNA
cgcatggacttccgcaag

SEQ ID NO: 897 - DNA, 18 bp, synthetic construct
  source 1..18: mol_type = other DNA
gcgcatggacttccgcaa

SEQ ID NO: 898 - DNA, 18 bp, synthetic construct
  source 1..18: mol_type = other DNA
ggcgcatggacttccgca

SEQ ID NO: 899 - DNA, 18 bp, synthetic construct
  source 1..18: mol_type = other DNA
tggcgcatggacttccgc

SEQ ID NO: 900 - DNA, 18 bp, synthetic construct
  source 1..18: mol_type = other DNA
atggcgcatggacttccg

SEQ ID NO: 901 - DNA, 18 bp, synthetic construct
  source 1..18: mol_type = other DNA
aatggcgcatggacttcc

SEQ ID NO: 902 - DNA, 18 bp, synthetic construct
  source 1..18: mol_type = other DNA
caatggcgcatggacttc

SEQ ID NO: 903 - DNA, 18 bp, synthetic construct
  source 1..18: mol_type = other DNA
ccaatggcgcatggactt

SEQ ID NO: 904 - DNA, 18 bp, synthetic construct
  source 1..18: mol_type = other DNA
cccaatggcgcatggact

SEQ ID NO: 905 - DNA, 18 bp, synthetic construct
  source 1..18: mol_type = other DNA
tcccaatggcgcatggac

SEQ ID NO: 906 - DNA, 18 bp, synthetic construct
  source 1..18: mol_type = other DNA
ctcccaatggcgcatgga

SEQ ID NO: 907 - DNA, 18 bp, synthetic construct
  source 1..18: mol_type = other DNA
cctcccaatggcgcatgg

SEQ ID NO: 908 - DNA, 18 bp, synthetic construct
  source 1..18: mol_type = other DNA
ccctcccaatggcgcatg

SEQ ID NO: 909 - DNA, 18 bp, synthetic construct
  source 1..18: mol_type = other DNA
gccctcccaatggcgcat

SEQ ID NO: 910 - DNA, 18 bp, synthetic construct
  source 1..18: mol_type = other DNA
ggccctcccaatggcgca

SEQ ID NO: 911 - DNA, 18 bp, synthetic construct
  source 1..18: mol_type = other DNA
aggccctcccaatggcgc

SEQ ID NO: 912 - DNA, 18 bp, synthetic construct
  source 1..18: mol_type = other DNA
gaggccctcccaatggcg

SEQ ID NO: 913 - DNA, 18 bp, synthetic construct
  source 1..18: mol_type = other DNA
cgaggccctcccaatggc

SEQ ID NO: 914 - DNA, 18 bp, synthetic construct
  source 1..18: mol_type = other DNA
ccgaggccctcccaatgg

SEQ ID NO: 915 - DNA, 18 bp, synthetic construct
  source 1..18: mol_type = other DNA
gccgaggccctcccaatg

SEQ ID NO: 916 - DNA, 18 bp, synthetic construct
  source 1..18: mol_type = other DNA
ggccgaggccctcccaat

SEQ ID NO: 917 - DNA, 18 bp, synthetic construct
  source 1..18: mol_type = other DNA
cggccgaggccctcccaa

SEQ ID NO: 918 - DNA, 18 bp, synthetic construct
  source 1..18: mol_type = other DNA
gcggccgaggccctccca

SEQ ID NO: 919 - DNA, 18 bp, synthetic construct
  source 1..18: mol_type = other DNA
cgcggccgaggccctccc

SEQ ID NO: 920 - DNA, 18 bp, synthetic construct
  source 1..18: mol_type = other DNA
ccgcggccgaggccctcc

SEQ ID NO: 921 - DNA, 18 bp, synthetic construct
  source 1..18: mol_type = other DNA
gccgcggccgaggccctc

SEQ ID NO: 922 - DNA, 18 bp, synthetic construct
  source 1..18: mol_type = other DNA
agccgcggccgaggccct

SEQ ID NO: 923 - DNA, 18 bp, synthetic construct
  source 1..18: mol_type = other DNA
gagccgcggccgaggccc

SEQ ID NO: 924 - DNA, 18 bp, synthetic construct
  source 1..18: mol_type = other DNA
agagccgcggccgaggcc

SEQ ID NO: 925 - DNA, 18 bp, synthetic construct
  source 1..18: mol_type = other DNA
cagagccgcggccgaggc

SEQ ID NO: 926 - DNA, 18 bp, synthetic construct
  source 1..18: mol_type = other DNA
acagagccgcggccgagg

SEQ ID NO: 927 - DNA, 18 bp, synthetic construct
  source 1..18: mol_type = other DNA
cacagagccgcggccgag

SEQ ID NO: 928 - DNA, 18 bp, synthetic construct
  source 1..18: mol_type = other DNA
gcacagagccgcggccga

SEQ ID NO: 929 - DNA, 18 bp, synthetic construct
  source 1..18: mol_type = other DNA
ggcacagagccgcggccg

SEQ ID NO: 930 - DNA, 18 bp, synthetic construct
  source 1..18: mol_type = other DNA
gggcacagagccgcggcc

SEQ ID NO: 931 - DNA, 18 bp, synthetic construct
  source 1..18: mol_type = other DNA
agggcacagagccgcggc

SEQ ID NO: 932 - DNA, 18 bp, synthetic construct
  source 1..18: mol_type = other DNA
aagggcacagagccgcgg

SEQ ID NO: 933 - DNA, 18 bp, synthetic construct
  source 1..18: mol_type = other DNA
caagggcacagagccgcg

SEQ ID NO: 934 - DNA, 18 bp, synthetic construct
  source 1..18: mol_type = other DNA
gcaagggcacagagccgc

SEQ ID NO: 935 - DNA, 18 bp, synthetic construct
  source 1..18: mol_type = other DNA
agcaagggcacagagccg

SEQ ID NO: 936 - DNA, 18 bp, synthetic construct
  source 1..18: mol_type = other DNA
cagcaagggcacagagcc

SEQ ID NO: 937 - DNA, 18 bp, synthetic construct
  source 1..18: mol_type = other DNA
gcagcaagggcacagagc

SEQ ID NO: 938 - DNA, 18 bp, synthetic construct
  source 1..18: mol_type = other DNA
agcagcaagggcacagag

SEQ ID NO: 939 - DNA, 18 bp, synthetic construct
  source 1..18: mol_type = other DNA
cagcagcaagggcacaga

SEQ ID NO: 940 - DNA, 18 bp, synthetic construct
  source 1..18: mol_type = other DNA
tcagcagcaagggcacag

SEQ ID NO: 941 - DNA, 18 bp, synthetic construct
  source 1..18: mol_type = other DNA
ctcagcagcaagggcaca

SEQ ID NO: 942 - DNA, 18 bp, synthetic construct
  source 1..18: mol_type = other DNA
cctcagcagcaagggcac

SEQ ID NO: 943 - DNA, 18 bp, synthetic construct
  source 1..18: mol_type = other DNA
ccctcagcagcaagggca

SEQ ID NO: 944 - DNA, 18 bp, synthetic construct
  source 1..18: mol_type = other DNA
gccctcagcagcaagggc

SEQ ID NO: 945 - DNA, 18 bp, synthetic construct
  source 1..18: mol_type = other DNA
ggccctcagcagcaaggg

SEQ ID NO: 946 - DNA, 18 bp, synthetic construct
  source 1..18: mol_type = other DNA
tggccctcagcagcaagg

SEQ ID NO: 947 - DNA, 18 bp, synthetic construct
  source 1..18: mol_type = other DNA
gtggccctcagcagcaag

SEQ ID NO: 948 - DNA, 18 bp, synthetic construct
  source 1..18: mol_type = other DNA
agtggccctcagcagcaa

SEQ ID NO: 949 - DNA, 18 bp, synthetic construct
  source 1..18: mol_type = other DNA
aagtggccctcagcagca

SEQ ID NO: 950 - DNA, 18 bp, synthetic construct
  source 1..18: mol_type = other DNA
gaagtggccctcagcagc

SEQ ID NO: 951 - DNA, 18 bp, synthetic construct
  source 1..18: mol_type = other DNA
ggaagtggccctcagcag

SEQ ID NO: 952 - DNA, 18 bp, synthetic construct
  source 1..18: mol_type = other DNA
aggaagtggccctcagca

SEQ ID NO: 953 - DNA, 18 bp, synthetic construct
  source 1..18: mol_type = other DNA
caggaagtggccctcagc

SEQ ID NO: 954 - DNA, 18 bp, synthetic construct
  source 1..18: mol_type = other DNA
ccaggaagtggccctcag

SEQ ID NO: 955 - DNA, 18 bp, synthetic construct
  source 1..18: mol_type = other DNA
cccaggaagtggccctca

SEQ ID NO: 956 - DNA, 18 bp, synthetic construct
  source 1..18: mol_type = other DNA
acccaggaagtggccctc

SEQ ID NO: 957 - DNA, 18 bp, synthetic construct
  source 1..18: mol_type = other DNA
gacccaggaagtggccct

SEQ ID NO: 958 - DNA, 18 bp, synthetic construct
  source 1..18: mol_type = other DNA
tgacccaggaagtggccc

SEQ ID NO: 959 - DNA, 18 bp, synthetic construct
  source 1..18: mol_type = other DNA
atgacccaggaagtggcc

SEQ ID NO: 960 - DNA, 18 bp, synthetic construct
  source 1..18: mol_type = other DNA
aatgacccaggaagtggc

SEQ ID NO: 961 - DNA, 18 bp, synthetic construct
  source 1..18: mol_type = other DNA
gaatgacccaggaagtgg

SEQ ID NO: 962 - DNA, 18 bp, synthetic construct
  source 1..18: mol_type = other DNA
ggaatgacccaggaagtg

SEQ ID NO: 963 - DNA, 18 bp, synthetic construct
  source 1..18: mol_type = other DNA
aggaatgacccaggaagt

SEQ ID NO: 964 - DNA, 18 bp, synthetic construct
  source 1..18: mol_type = other DNA
caggaatgacccaggaag

SEQ ID NO: 965 - DNA, 18 bp, synthetic construct
  source 1..18: mol_type = other DNA
ccaggaatgacccaggaa

SEQ ID NO: 966 - DNA, 18 bp, synthetic construct
  source 1..18: mol_type = other DNA
tccaggaatgacccagga

SEQ ID NO: 967 - DNA, 18 bp, synthetic construct
  source 1..18: mol_type = other DNA
gtccaggaatgacccagg

SEQ ID NO: 968 - DNA, 18 bp, synthetic construct
  source 1..18: mol_type = other DNA
ggtccaggaatgacccag

SEQ ID NO: 969 - DNA, 18 bp, synthetic construct
  source 1..18: mol_type = other DNA
cggtccaggaatgaccca

SEQ ID NO: 970 - DNA, 18 bp, synthetic construct
  source 1..18: mol_type = other DNA
ccggtccaggaatgaccc

SEQ ID NO: 971 - DNA, 18 bp, synthetic construct
  source 1..18: mol_type = other DNA
cccggtccaggaatgacc

SEQ ID NO: 972 - DNA, 18 bp, synthetic construct
  source 1..18: mol_type = other DNA
tcccggtccaggaatgac

SEQ ID NO: 973 - DNA, 18 bp, synthetic construct
  source 1..18: mol_type = other DNA
ctcccggtccaggaatga

SEQ ID NO: 974 - DNA, 18 bp, synthetic construct
  source 1..18: mol_type = other DNA
gctcccggtccaggaatg

SEQ ID NO: 975 - DNA, 18 bp, synthetic construct
  source 1..18: mol_type = other DNA
ggctcccggtccaggaat

SEQ ID NO: 976 - DNA, 18 bp, synthetic construct
  source 1..18: mol_type = other DNA
cggctcccggtccaggaa

SEQ ID NO: 977 - DNA, 18 bp, synthetic construct
  source 1..18: mol_type = other DNA
ccggctcccggtccagga

SEQ ID NO: 978 - DNA, 18 bp, synthetic construct
  source 1..18: mol_type = other DNA
cccggctcccggtccagg

SEQ ID NO: 979 - DNA, 18 bp, synthetic construct
  source 1..18: mol_type = other DNA
gcccggctcccggtccag

SEQ ID NO: 980 - DNA, 18 bp, synthetic construct
  source 1..18: mol_type = other DNA
agcccggctcccggtcca

SEQ ID NO: 981 - DNA, 18 bp, synthetic construct
  source 1..18: mol_type = other DNA
cagcccggctcccggtcc

SEQ ID NO: 982 - DNA, 18 bp, synthetic construct
  source 1..18: mol_type = other DNA
ccagcccggctcccggtc

SEQ ID NO: 983 - DNA, 18 bp, synthetic construct
  source 1..18: mol_type = other DNA
cccagcccggctcccggt

SEQ ID NO: 984 - DNA, 18 bp, synthetic construct
  source 1..18: mol_type = other DNA
ccccagcccggctcccgg

SEQ ID NO: 985 - DNA, 18 bp, synthetic construct
  source 1..18: mol_type = other DNA
gccccagcccggctcccg

SEQ ID NO: 986 - DNA, 18 bp, synthetic construct
  source 1..18: mol_type = other DNA
agccccagcccggctccc

SEQ ID NO: 987 - DNA, 18 bp, synthetic construct
  source 1..18: mol_type = other DNA
gagccccagcccggctcc

SEQ ID NO: 988 - DNA, 18 bp, synthetic construct
  source 1..18: mol_type = other DNA
tgagccccagcccggctc

SEQ ID NO: 989 - DNA, 18 bp, synthetic construct
  source 1..18: mol_type = other DNA
gtgagccccagcccggct

SEQ ID NO: 990 - DNA, 18 bp, synthetic construct
  source 1..18: mol_type = other DNA
tgtgagccccagcccggc

SEQ ID NO: 991 - DNA, 18 bp, synthetic construct
  source 1..18: mol_type = other DNA
gtgtgagccccagcccgg

SEQ ID NO: 992 - DNA, 18 bp, synthetic construct
  source 1..18: mol_type = other DNA
cgtgtgagccccagcccg

SEQ ID NO: 993 - DNA, 18 bp, synthetic construct
  source 1..18: mol_type = other DNA
ccgtgtgagccccagccc

SEQ ID NO: 994 - DNA, 18 bp, synthetic construct
  source 1..18: mol_type = other DNA
cccgtgtgagccccagcc

SEQ ID NO: 995 - DNA, 18 bp, synthetic construct
  source 1..18: mol_type = other DNA
ccccgtgtgagccccagc

SEQ ID NO: 996 - DNA, 18 bp, synthetic construct
  source 1..18: mol_type = other DNA
cccccgtgtgagccccag

SEQ ID NO: 997 - DNA, 18 bp, synthetic construct
  source 1..18: mol_type = other DNA
gcccccgtgtgagcccca

SEQ ID NO: 998 - DNA, 18 bp, synthetic construct
  source 1..18: mol_type = other DNA
agcccccgtgtgagcccc

SEQ ID NO: 999 - DNA, 18 bp, synthetic construct
  source 1..18: mol_type = other DNA
gagcccccgtgtgagccc

SEQ ID NO: 1000 - DNA, 18 bp, synthetic construct
  source 1..18: mol_type = other DNA
ggagcccccgtgtgagcc

SEQ ID NO: 1001 - DNA, 18 bp, synthetic construct
  source 1..18: mol_type = other DNA
gggagcccccgtgtgagc

SEQ ID NO: 1002 - DNA, 18 bp, synthetic construct
  source 1..18: mol_type = other DNA
cgggagcccccgtgtgag

SEQ ID NO: 1003 - DNA, 18 bp, synthetic construct
  source 1..18: mol_type = other DNA
gcgggagcccccgtgtga

SEQ ID NO: 1004 - DNA, 18 bp, synthetic construct
  source 1..18: mol_type = other DNA
cgcgggagcccccgtgtg

SEQ ID NO: 1005 - DNA, 18 bp, synthetic construct
  source 1..18: mol_type = other DNA
acgcgggagcccccgtgt

SEQ ID NO: 1006 - DNA, 18 bp, synthetic construct
  source 1..18: mol_type = other DNA
cacgcgggagcccccgtg

SEQ ID NO: 1007 - DNA, 18 bp, synthetic construct
  source 1..18: mol_type = other DNA
ccacgcgggagcccccgt

SEQ ID NO: 1008 - DNA, 18 bp, synthetic construct
  source 1..18: mol_type = other DNA
gccacgcgggagcccccg

SEQ ID NO: 1009 - DNA, 18 bp, synthetic construct
  source 1..18: mol_type = other DNA
ggccacgcgggagccccc

SEQ ID NO: 1010 - DNA, 18 bp, synthetic construct
  source 1..18: mol_type = other DNA
cggccacgcgggagcccc

SEQ ID NO: 1011 - DNA, 18 bp, synthetic construct
  source 1..18: mol_type = other DNA
acggccacgcgggagccc

SEQ ID NO: 1012 - DNA, 18 bp, synthetic construct
  source 1..18: mol_type = other DNA
gacggccacgcgggagcc

SEQ ID NO: 1013 - DNA, 18 bp, synthetic construct
  source 1..18: mol_type = other DNA
agacggccacgcgggagc

SEQ ID NO: 1014 - DNA, 18 bp, synthetic construct
  source 1..18: mol_type = other DNA
gagacggccacgcgggag

SEQ ID NO: 1015 - DNA, 18 bp, synthetic construct
  source 1..18: mol_type = other DNA
cgagacggccacgcggga

SEQ ID NO: 1016 - DNA, 18 bp, synthetic construct
  source 1..18: mol_type = other DNA
ccgagacggccacgcggg

SEQ ID NO: 1017 - DNA, 18 bp, synthetic construct
  source 1..18: mol_type = other DNA
gccgagacggccacgcgg

SEQ ID NO: 1018 - DNA, 18 bp, synthetic construct
  source 1..18: mol_type = other DNA
cgccgagacggccacgcg

SEQ ID NO: 1019 - DNA, 18 bp, synthetic construct
  source 1..18: mol_type = other DNA
gcgccgagacggccacgc

SEQ ID NO: 1020 - DNA, 18 bp, synthetic construct
  source 1..18: mol_type = other DNA
ggcgccgagacggccacg

SEQ ID NO: 1021 - DNA, 18 bp, synthetic construct
  source 1..18: mol_type = other DNA
aggcgccgagacggccac

SEQ ID NO: 1022 - DNA, 18 bp, synthetic construct
  source 1..18: mol_type = other DNA
caggcgccgagacggcca

SEQ ID NO: 1023 - DNA, 18 bp, synthetic construct
  source 1..18: mol_type = other DNA
gcaggcgccgagacggcc

SEQ ID NO: 1024 - DNA, 18 bp, synthetic construct
  source 1..18: mol_type = other DNA
cgcaggcgccgagacggc

SEQ ID NO: 1025 - DNA, 18 bp, synthetic construct
  source 1..18: mol_type = other DNA
acgcaggcgccgagacgg

SEQ ID NO: 1026 - DNA, 18 bp, synthetic construct
  source 1..18: mol_type = other DNA
cacgcaggcgccgagacg

SEQ ID NO: 1027 - DNA, 18 bp, synthetic construct
  source 1..18: mol_type = other DNA
tcacgcaggcgccgagac

SEQ ID NO: 1028 - DNA, 18 bp, synthetic construct
  source 1..18: mol_type = other DNA
gtcacgcaggcgccgaga

SEQ ID NO: 1029 - DNA, 18 bp, synthetic construct
  source 1..18: mol_type = other DNA
ggtcacgcaggcgccgag

SEQ ID NO: 1030 - DNA, 18 bp, synthetic construct
  source 1..18: mol_type = other DNA
aggtcacgcaggcgccga

SEQ ID NO: 1031 - DNA, 18 bp, synthetic construct
  source 1..18: mol_type = other DNA
gaggtcacgcaggcgccg

SEQ ID NO: 1032 - DNA, 18 bp, synthetic construct
  source 1..18: mol_type = other DNA
ggaggtcacgcaggcgcc

SEQ ID NO: 1033 - DNA, 18 bp, synthetic construct
  source 1..18: mol_type = other DNA
gggaggtcacgcaggcgc

SEQ ID NO: 1034 - DNA, 18 bp, synthetic construct
  source 1..18: mol_type = other DNA
ggggaggtcacgcaggcg

SEQ ID NO: 1035 - DNA, 18 bp, synthetic construct
  source 1..18: mol_type = other DNA
cggggaggtcacgcaggc

SEQ ID NO: 1036 - DNA, 18 bp, synthetic construct
  source 1..18: mol_type = other DNA
gcggggaggtcacgcagg

SEQ ID NO: 1037 - DNA, 18 bp, synthetic construct
  source 1..18: mol_type = other DNA
ggcggggaggtcacgcag

SEQ ID NO: 1038 - DNA, 18 bp, synthetic construct
  source 1..18: mol_type = other DNA
cggcggggaggtcacgca

SEQ ID NO: 1039 - DNA, 18 bp, synthetic construct
  source 1..18: mol_type = other DNA
ccggcggggaggtcacgc

SEQ ID NO: 1040 - DNA, 18 bp, synthetic construct
  source 1..18: mol_type = other DNA
gccggcggggaggtcacg

SEQ ID NO: 1041 - DNA, 18 bp, synthetic construct
  source 1..18: mol_type = other DNA
cgccggcggggaggtcac

SEQ ID NO: 1042 - DNA, 18 bp, synthetic construct
  source 1..18: mol_type = other DNA
ccgccggcggggaggtca

SEQ ID NO: 1043 - DNA, 18 bp, synthetic construct
  source 1..18: mol_type = other DNA
cccgccggcggggaggtc

SEQ ID NO: 1044 - DNA, 25 bp, synthetic construct
  source 1..25: mol_type = other DNA
ttcaccctttctaggcgggcagcac

SEQ ID NO: 1045 - DNA, 25 bp, synthetic construct
  source 1..25: mol_type = other DNA
cttcaccctttctaggcgggcagca

SEQ ID NO: 1046 - DNA, 25 bp, synthetic construct
  source 1..25: mol_type = other DNA
acttcaccctttctaggcgggcagc

SEQ ID NO: 1047 - DNA, 25 bp, synthetic construct
  source 1..25: mol_type = other DNA
cacttcaccctttctaggcgggcag

SEQ ID NO: 1048 - DNA, 25 bp, synthetic construct
  source 1..25: mol_type = other DNA
ccacttcaccctttctaggcgggca

SEQ ID NO: 1049 - DNA, 25 bp, synthetic construct
  source 1..25: mol_type = other DNA
accacttcaccctttctaggcgggc

SEQ ID NO: 1050 - DNA, 25 bp, synthetic construct
  source 1..25: mol_type = other DNA
aaccacttcaccctttctaggcggg

SEQ ID NO: 1051 - DNA, 25 bp, synthetic construct
  source 1..25: mol_type = other DNA
caaccacttcaccctttctaggcgg

SEQ ID NO: 1052 - DNA, 25 bp, synthetic construct
  source 1..25: mol_type = other DNA
acaaccacttcaccctttctaggcg

SEQ ID NO: 1053 - DNA, 25 bp, synthetic construct
  source 1..25: mol_type = other DNA
aacaaccacttcaccctttctaggc

SEQ ID NO: 1054 - DNA, 25 bp, synthetic construct
  source 1..25: mol_type = other DNA
aaacaaccacttcaccctttctagg

SEQ ID NO: 1055 - DNA, 25 bp, synthetic construct
  source 1..25: mol_type = other DNA
gaaacaaccacttcaccctttctag

SEQ ID NO: 1056 - DNA, 25 bp, synthetic construct
  source 1..25: mol_type = other DNA
ggaaacaaccacttcaccctttcta

SEQ ID NO: 1057 - DNA, 25 bp, synthetic construct
  source 1..25: mol_type = other DNA
cggaaacaaccacttcaccctttct

SEQ ID NO: 1058 - DNA, 25 bp, synthetic construct
  source 1..25: mol_type = other DNA
acggaaacaaccacttcaccctttc

SEQ ID NO: 1059 - DNA, 25 bp, synthetic construct
  source 1..25: mol_type = other DNA
cacggaaacaaccacttcacccttt

SEQ ID NO: 1060 - DNA, 25 bp, synthetic construct
  source 1..25: mol_type = other DNA
tcacggaaacaaccacttcaccctt

SEQ ID NO: 1061 - DNA, 25 bp, synthetic construct
  source 1..25: mol_type = other DNA
gtcacggaaacaaccacttcaccct

SEQ ID NO: 1062 - DNA, 25 bp, synthetic construct
  source 1..25: mol_type = other DNA
cgtcacggaaacaaccacttcaccc

SEQ ID NO: 1063 - DNA, 25 bp, synthetic construct
  source 1..25: mol_type = other DNA
ccgtcacggaaacaaccacttcacc

SEQ ID NO: 1064 - DNA, 25 bp, synthetic construct
  source 1..25: mol_type = other DNA
tccgtcacggaaacaaccacttcac

SEQ ID NO: 1065 - DNA, 25 bp, synthetic construct
  source 1..25: mol_type = other DNA
gtccgtcacggaaacaaccacttca

SEQ ID NO: 1066 - DNA, 25 bp, synthetic construct
  source 1..25: mol_type = other DNA
agtccgtcacggaaacaaccacttc

SEQ ID NO: 1067 - DNA, 25 bp, synthetic construct
  source 1..25: mol_type = other DNA
cagtccgtcacggaaacaaccactt

SEQ ID NO: 1068 - DNA, 25 bp, synthetic construct
  source 1..25: mol_type = other DNA
tcagtccgtcacggaaacaaccact

SEQ ID NO: 1069 - DNA, 25 bp, synthetic construct
  source 1..25: mol_type = other DNA
ctcagtccgtcacggaaacaaccac

SEQ ID NO: 1070 - DNA, 25 bp, synthetic construct
  source 1..25: mol_type = other DNA
actcagtccgtcacggaaacaacca

SEQ ID NO: 1071 - DNA, 25 bp, synthetic construct
  source 1..25: mol_type = other DNA
tactcagtccgtcacggaaacaacc

SEQ ID NO: 1072 - DNA, 25 bp, synthetic construct
  source 1..25: mol_type = other DNA
gtactcagtccgtcacggaaacaac

SEQ ID NO: 1073 - DNA, 25 bp, synthetic construct
  source 1..25: mol_type = other DNA
cgtactcagtccgtcacggaaacaa

SEQ ID NO: 1074 - DNA, 25 bp, synthetic construct
  source 1..25: mol_type = other DNA
ccgtactcagtccgtcacggaaaca

SEQ ID NO: 1075 - DNA, 25 bp, synthetic construct
  source 1..25: mol_type = other DNA
cccgtactcagtccgtcacggaaac

SEQ ID NO: 1076 - DNA, 25 bp, synthetic construct
  source 1..25: mol_type = other DNA
acccgtactcagtccgtcacggaaa

SEQ ID NO: 1077 - DNA, 25 bp, synthetic construct
  source 1..25: mol_type = other DNA
cacccgtactcagtccgtcacggaa

SEQ ID NO: 1078 - DNA, 25 bp, synthetic construct
  source 1..25: mol_type = other DNA
gcacccgtactcagtccgtcacgga

SEQ ID NO: 1079 - DNA, 25 bp, synthetic construct
  source 1..25: mol_type = other DNA
ggcacccgtactcagtccgtcacgg

SEQ ID NO: 1080 - DNA, 25 bp, synthetic construct
  source 1..25: mol_type = other DNA
aggcacccgtactcagtccgtcacg

SEQ ID NO: 1081 - DNA, 25 bp, synthetic construct
  source 1..25: mol_type = other DNA
caggcacccgtactcagtccgtcac

SEQ ID NO: 1082 - DNA, 25 bp, synthetic construct
  source 1..25: mol_type = other DNA
acaggcacccgtactcagtccgtca

SEQ ID NO: 1083 - DNA, 25 bp, synthetic construct
  source 1..25: mol_type = other DNA
gacaggcacccgtactcagtccgtc

SEQ ID NO: 1084 - DNA, 25 bp, synthetic construct
  source 1..25: mol_type = other DNA
tgacaggcacccgtactcagtccgt

SEQ ID NO: 1085 - DNA, 25 bp, synthetic construct
  source 1..25: mol_type = other DNA
ctgacaggcacccgtactcagtccg

SEQ ID NO: 1086 - DNA, 25 bp, synthetic construct
  source 1..25: mol_type = other DNA
cctgacaggcacccgtactcagtcc

SEQ ID NO: 1087 - DNA, 25 bp, synthetic construct
  source 1..25: mol_type = other DNA
gcctgacaggcacccgtactcagtc

SEQ ID NO: 1088 - DNA, 25 bp, synthetic construct
  source 1..25: mol_type = other DNA
agcctgacaggcacccgtactcagt

SEQ ID NO: 1089 - DNA, 25 bp, synthetic construct
  source 1..25: mol_type = other DNA
gagcctgacaggcacccgtactcag

SEQ ID NO: 1090 - DNA, 25 bp, synthetic construct
  source 1..25: mol_type = other DNA
agagcctgacaggcacccgtactca

SEQ ID NO: 1091 - DNA, 25 bp, synthetic construct
  source 1..25: mol_type = other DNA
aagagcctgacaggcacccgtactc

SEQ ID NO: 1092 - DNA, 25 bp, synthetic construct
  source 1..25: mol_type = other DNA
caagagcctgacaggcacccgtact

SEQ ID NO: 1093 - DNA, 25 bp, synthetic construct
  source 1..25: mol_type = other DNA
gcaagagcctgacaggcacccgtac

SEQ ID NO: 1094 - DNA, 25 bp, synthetic construct
  source 1..25: mol_type = other DNA
cgcaagagcctgacaggcacccgta

SEQ ID NO: 1095 - DNA, 25 bp, synthetic construct
  source 1..25: mol_type = other DNA
ccgcaagagcctgacaggcacccgt

SEQ ID NO: 1096 - DNA, 25 bp, synthetic construct
  source 1..25: mol_type = other DNA
tccgcaagagcctgacaggcacccg

SEQ ID NO: 1097 - DNA, 25 bp, synthetic construct
  source 1..25: mol_type = other DNA
ttccgcaagagcctgacaggcaccc

SEQ ID NO: 1098 - DNA, 25 bp, synthetic construct
  source 1..25: mol_type = other DNA
cttccgcaagagcctgacaggcacc

SEQ ID NO: 1099 - DNA, 25 bp, synthetic construct
  source 1..25: mol_type = other DNA
acttccgcaagagcctgacaggcac

SEQ ID NO: 1100 - DNA, 25 bp, synthetic construct
  source 1..25: mol_type = other DNA
gacttccgcaagagcctgacaggca

SEQ ID NO: 1101 - DNA, 25 bp, synthetic construct
  source 1..25: mol_type = other DNA
ggacttccgcaagagcctgacaggc

SEQ ID NO: 1102 - DNA, 25 bp, synthetic construct
  source 1..25: mol_type = other DNA
tggacttccgcaagagcctgacagg

SEQ ID NO: 1103 - DNA, 25 bp, synthetic construct
  source 1..25: mol_type = other DNA
atggacttccgcaagagcctgacag

SEQ ID NO: 1104 - DNA, 25 bp, synthetic construct
  source 1..25: mol_type = other DNA
catggacttccgcaagagcctgaca

SEQ ID NO: 1105 - DNA, 25 bp, synthetic construct
  source 1..25: mol_type = other DNA
gcatggacttccgcaagagcctgac

SEQ ID NO: 1106 - DNA, 25 bp, synthetic construct
  source 1..25: mol_type = other DNA
cgcatggacttccgcaagagcctga

SEQ ID NO: 1107 - DNA, 25 bp, synthetic construct
  source 1..25: mol_type = other DNA
gcgcatggacttccgcaagagcctg

SEQ ID NO: 1108 - DNA, 25 bp, synthetic construct
  source 1..25: mol_type = other DNA
ggcgcatggacttccgcaagagcct

SEQ ID NO: 1109 - DNA, 25 bp, synthetic construct
  source 1..25: mol_type = other DNA
tggcgcatggacttccgcaagagcc

SEQ ID NO: 1110 - DNA, 25 bp, synthetic construct
  source 1..25: mol_type = other DNA
atggcgcatggacttccgcaagagc

SEQ ID NO: 1111 - DNA, 25 bp, synthetic construct
  source 1..25: mol_type = other DNA
aatggcgcatggacttccgcaagag

SEQ ID NO: 1112 - DNA, 25 bp, synthetic construct
  source 1..25: mol_type = other DNA
caatggcgcatggacttccgcaaga

SEQ ID NO: 1113 - DNA, 25 bp, synthetic construct
  source 1..25: mol_type = other DNA
ccaatggcgcatggacttccgcaag

SEQ ID NO: 1114 - DNA, 25 bp, synthetic construct
  source 1..25: mol_type = other DNA
cccaatggcgcatggacttccgcaa

SEQ ID NO: 1115 - DNA, 25 bp, synthetic construct
  source 1..25: mol_type = other DNA
tcccaatggcgcatggacttccgca

SEQ ID NO: 1116 - DNA, 25 bp, synthetic construct
  source 1..25: mol_type = other DNA
ctcccaatggcgcatggacttccgc

SEQ ID NO: 1117 - DNA, 25 bp, synthetic construct
  source 1..25: mol_type = other DNA
cctcccaatggcgcatggacttccg

SEQ ID NO: 1118 - DNA, 25 bp, synthetic construct
  source 1..25: mol_type = other DNA
ccctcccaatggcgcatggacttcc

SEQ ID NO: 1119 - DNA, 25 bp, synthetic construct
  source 1..25: mol_type = other DNA
gccctcccaatggcgcatggacttc

SEQ ID NO: 1120 - DNA, 25 bp, synthetic construct
  source 1..25: mol_type = other DNA
ggccctcccaatggcgcatggactt

SEQ ID NO: 1121 - DNA, 25 bp, synthetic construct
  source 1..25: mol_type = other DNA
aggccctcccaatggcgcatggact

SEQ ID NO: 1122 - DNA, 25 bp, synthetic construct
  source 1..25: mol_type = other DNA
gaggccctcccaatggcgcatggac

SEQ ID NO: 1123 - DNA, 25 bp, synthetic construct
  source 1..25: mol_type = other DNA
cgaggccctcccaatggcgcatgga

SEQ ID NO: 1124 - DNA, 25 bp, synthetic construct
  source 1..25: mol_type = other DNA
ccgaggccctcccaatggcgcatgg

SEQ ID NO: 1125 - DNA, 25 bp, synthetic construct
  source 1..25: mol_type = other DNA
gccgaggccctcccaatggcgcatg

SEQ ID NO: 1126 - DNA, 25 bp, synthetic construct
  source 1..25: mol_type = other DNA
ggccgaggccctcccaatggcgcat

SEQ ID NO: 1127 - DNA, 25 bp, synthetic construct
  source 1..25: mol_type = other DNA
cggccgaggccctcccaatggcgca

SEQ ID NO: 1128 - DNA, 25 bp, synthetic construct
  source 1..25: mol_type = other DNA
gcggccgaggccctcccaatggcgc

SEQ ID NO: 1129 - DNA, 25 bp, synthetic construct
  source 1..25: mol_type = other DNA
cgcggccgaggccctcccaatggcg

SEQ ID NO: 1130 - DNA, 25 bp, synthetic construct
  source 1..25: mol_type = other DNA
ccgcggccgaggccctcccaatggc

SEQ ID NO: 1131 - DNA, 25 bp, synthetic construct
  source 1..25: mol_type = other DNA
gccgcggccgaggccctcccaatgg

SEQ ID NO: 1132 - DNA, 25 bp, synthetic construct
  source 1..25: mol_type = other DNA
agccgcggccgaggccctcccaatg

SEQ ID NO: 1133 - DNA, 25 bp, synthetic construct
  source 1..25: mol_type = other DNA
gagccgcggccgaggccctcccaat

SEQ ID NO: 1134 - DNA, 25 bp, synthetic construct
  source 1..25: mol_type = other DNA
agagccgcggccgaggccctcccaa

SEQ ID NO: 1135 - DNA, 25 bp, synthetic construct
  source 1..25: mol_type = other DNA
cagagccgcggccgaggccctccca

SEQ ID NO: 1136 - DNA, 25 bp, synthetic construct
  source 1..25: mol_type = other DNA
acagagccgcggccgaggccctccc

SEQ ID NO: 1137 - DNA, 25 bp, synthetic construct
  source 1..25: mol_type = other DNA
cacagagccgcggccgaggccctcc

SEQ ID NO: 1138 - DNA, 25 bp, synthetic construct
  source 1..25: mol_type = other DNA
gcacagagccgcggccgaggccctc

SEQ ID NO: 1139 - DNA, 25 bp, synthetic construct
  source 1..25: mol_type = other DNA
ggcacagagccgcggccgaggccct

SEQ ID NO: 1140 - DNA, 25 bp, synthetic construct
  source 1..25: mol_type = other DNA
gggcacagagccgcggccgaggccc

SEQ ID NO: 1141 - DNA, 25 bp, synthetic construct
  source 1..25: mol_type = other DNA
agggcacagagccgcggccgaggcc

SEQ ID NO: 1142 - DNA, 25 bp, synthetic construct
  source 1..25: mol_type = other DNA
aagggcacagagccgcggccgaggc

SEQ ID NO: 1143 - DNA, 25 bp, synthetic construct
  source 1..25: mol_type = other DNA
caagggcacagagccgcggccgagg

SEQ ID NO: 1144 - DNA, 25 bp, synthetic construct
  source 1..25: mol_type = other DNA
gcaagggcacagagccgcggccgag

SEQ ID NO: 1145 - DNA, 25 bp, synthetic construct
  source 1..25: mol_type = other DNA
agcaagggcacagagccgcggccga

SEQ ID NO: 1146 - DNA, 25 bp, synthetic construct
  source 1..25: mol_type = other DNA
cagcaagggcacagagccgcggccg

SEQ ID NO: 1147 - DNA, 25 bp, synthetic construct
  source 1..25: mol_type = other DNA
gcagcaagggcacagagccgcggcc

SEQ ID NO: 1148 - DNA, 25 bp, synthetic construct
  source 1..25: mol_type = other DNA
agcagcaagggcacagagccgcggc

SEQ ID NO: 1149 - DNA, 25 bp, synthetic construct
  source 1..25: mol_type = other DNA
cagcagcaagggcacagagccgcgg

SEQ ID NO: 1150 - DNA, 25 bp, synthetic construct
  source 1..25: mol_type = other DNA
tcagcagcaagggcacagagccgcg

SEQ ID NO: 1151 - DNA, 25 bp, synthetic construct
  source 1..25: mol_type = other DNA
ctcagcagcaagggcacagagccgc

SEQ ID NO: 1152 - DNA, 25 bp, synthetic construct
  source 1..25: mol_type = other DNA
cctcagcagcaagggcacagagccg

SEQ ID NO: 1153 - DNA, 25 bp, synthetic construct
  source 1..25: mol_type = other DNA
ccctcagcagcaagggcacagagcc

SEQ ID NO: 1154 - DNA, 25 bp, synthetic construct
  source 1..25: mol_type = other DNA
gccctcagcagcaagggcacagagc

SEQ ID NO: 1155 - DNA, 25 bp, synthetic construct
  source 1..25: mol_type = other DNA
ggccctcagcagcaagggcacagag

SEQ ID NO: 1156 - DNA, 25 bp, synthetic construct
  source 1..25: mol_type = other DNA
tggccctcagcagcaagggcacaga

SEQ ID NO: 1157 - DNA, 25 bp, synthetic construct
  source 1..25: mol_type = other DNA
gtggccctcagcagcaagggcacag

SEQ ID NO: 1158 - DNA, 25 bp, synthetic construct
  source 1..25: mol_type = other DNA
agtggccctcagcagcaagggcaca

SEQ ID NO: 1159 - DNA, 25 bp, synthetic construct
  source 1..25: mol_type = other DNA
aagtggccctcagcagcaagggcac

SEQ ID NO: 1160 - DNA, 25 bp, synthetic construct
  source 1..25: mol_type = other DNA
gaagtggccctcagcagcaagggca

SEQ ID NO: 1161 - DNA, 25 bp, synthetic construct
  source 1..25: mol_type = other DNA
ggaagtggccctcagcagcaagggc

SEQ ID NO: 1162 - DNA, 25 bp, synthetic construct
  source 1..25: mol_type = other DNA
aggaagtggccctcagcagcaaggg

SEQ ID NO: 1163 - DNA, 25 bp, synthetic construct
  source 1..25: mol_type = other DNA
caggaagtggccctcagcagcaagg

SEQ ID NO: 1164 - DNA, 25 bp, synthetic construct
  source 1..25: mol_type = other DNA
ccaggaagtggccctcagcagcaag

SEQ ID NO: 1165 - DNA, 25 bp, synthetic construct
  source 1..25: mol_type = other DNA
cccaggaagtggccctcagcagcaa

SEQ ID NO: 1166 - DNA, 25 bp, synthetic construct
  source 1..25: mol_type = other DNA
acccaggaagtggccctcagcagca

SEQ ID NO: 1167 - DNA, 25 bp, synthetic construct
  source 1..25: mol_type = other DNA
gacccaggaagtggccctcagcagc

SEQ ID NO: 1168 - DNA, 25 bp, synthetic construct
  source 1..25: mol_type = other DNA
tgacccaggaagtggccctcagcag

SEQ ID NO: 1169 - DNA, 25 bp, synthetic construct
  source 1..25: mol_type = other DNA
atgacccaggaagtggccctcagca

SEQ ID NO: 1170 - DNA, 25 bp, synthetic construct
  source 1..25: mol_type = other DNA
aatgacccaggaagtggccctcagc

SEQ ID NO: 1171 - DNA, 25 bp, synthetic construct
  source 1..25: mol_type = other DNA
gaatgacccaggaagtggccctcag

SEQ ID NO: 1172 - DNA, 25 bp, synthetic construct
  source 1..25: mol_type = other DNA
ggaatgacccaggaagtggccctca

SEQ ID NO: 1173 - DNA, 25 bp, synthetic construct
  source 1..25: mol_type = other DNA
aggaatgacccaggaagtggccctc

SEQ ID NO: 1174 - DNA, 25 bp, synthetic construct
  source 1..25: mol_type = other DNA
caggaatgacccaggaagtggccct

SEQ ID NO: 1175 - DNA, 25 bp, synthetic construct
  source 1..25: mol_type = other DNA
ccaggaatgacccaggaagtggccc

SEQ ID NO: 1176 - DNA, 25 bp, synthetic construct
  source 1..25: mol_type = other DNA
tccaggaatgacccaggaagtggcc

SEQ ID NO: 1177 - DNA, 25 bp, synthetic construct
  source 1..25: mol_type = other DNA
gtccaggaatgacccaggaagtggc

SEQ ID NO: 1178 - DNA, 25 bp, synthetic construct
  source 1..25: mol_type = other DNA
ggtccaggaatgacccaggaagtgg

SEQ ID NO: 1179 - DNA, 25 bp, synthetic construct
  source 1..25: mol_type = other DNA
cggtccaggaatgacccaggaagtg

SEQ ID NO: 1180 - DNA, 25 bp, synthetic construct
  source 1..25: mol_type = other DNA
ccggtccaggaatgacccaggaagt

SEQ ID NO: 1181 - DNA, 25 bp, synthetic construct
  source 1..25: mol_type = other DNA
cccggtccaggaatgacccaggaag

SEQ ID NO: 1182 - DNA, 25 bp, synthetic construct
  source 1..25: mol_type = other DNA
tcccggtccaggaatgacccaggaa

SEQ ID NO: 1183 - DNA, 25 bp, synthetic construct
  source 1..25: mol_type = other DNA
ctcccggtccaggaatgacccagga

SEQ ID NO: 1184 - DNA, 25 bp, synthetic construct
  source 1..25: mol_type = other DNA
gctcccggtccaggaatgacccagg

SEQ ID NO: 1185 - DNA, 25 bp, synthetic construct
  source 1..25: mol_type = other DNA
ggctcccggtccaggaatgacccag

SEQ ID NO: 1186 - DNA, 25 bp, synthetic construct
  source 1..25: mol_type = other DNA
cggctcccggtccaggaatgaccca

SEQ ID NO: 1187 - DNA, 25 bp, synthetic construct
  source 1..25: mol_type = other DNA
ccggctcccggtccaggaatgaccc

SEQ ID NO: 1188 - DNA, 25 bp, synthetic construct
  source 1..25: mol_type = other DNA
cccggctcccggtccaggaatgacc

SEQ ID NO: 1189 - DNA, 25 bp, synthetic construct
  source 1..25: mol_type = other DNA
gcccggctcccggtccaggaatgac

SEQ ID NO: 1190 - DNA, 25 bp, synthetic construct
  source 1..25: mol_type = other DNA
agcccggctcccggtccaggaatga

SEQ ID NO: 1191 - DNA, 25 bp, synthetic construct
  source 1..25: mol_type = other DNA
cagcccggctcccggtccaggaatg

SEQ ID NO: 1192 - DNA, 25 bp, synthetic construct
  source 1..25: mol_type = other DNA
ccagcccggctcccggtccaggaat

SEQ ID NO: 1193 - DNA, 25 bp, synthetic construct
  source 1..25: mol_type = other DNA
cccagcccggctcccggtccaggaa

SEQ ID NO: 1194 - DNA, 25 bp, synthetic construct
  source 1..25: mol_type = other DNA
ccccagcccggctcccggtccagga

SEQ ID NO: 1195 - DNA, 25 bp, synthetic construct
  source 1..25: mol_type = other DNA
gccccagcccggctcccggtccagg

SEQ ID NO: 1196 - DNA, 25 bp, synthetic construct
  source 1..25: mol_type = other DNA
agccccagcccggctcccggtccag

SEQ ID NO: 1197 - DNA, 25 bp, synthetic construct
  source 1..25: mol_type = other DNA
gagccccagcccggctcccggtcca

SEQ ID NO: 1198 - DNA, 25 bp, synthetic construct
  source 1..25: mol_type = other DNA
tgagccccagcccggctcccggtcc

SEQ ID NO: 1199 - DNA, 25 bp, synthetic construct
  source 1..25: mol_type = other DNA
gtgagccccagcccggctcccggtc

SEQ ID NO: 1200 - DNA, 25 bp, synthetic construct
  source 1..25: mol_type = other DNA
tgtgagccccagcccggctcccggt

SEQ ID NO: 1201 - DNA, 25 bp, synthetic construct
  source 1..25: mol_type = other DNA
gtgtgagccccagcccggctcccgg

SEQ ID NO: 1202 - DNA, 25 bp, synthetic construct
  source 1..25: mol_type = other DNA
cgtgtgagccccagcccggctcccg

SEQ ID NO: 1203 - DNA, 25 bp, synthetic construct
  source 1..25: mol_type = other DNA
ccgtgtgagccccagcccggctccc

SEQ ID NO: 1204 - DNA, 25 bp, synthetic construct
  source 1..25: mol_type = other DNA
cccgtgtgagccccagcccggctcc

SEQ ID NO: 1205 - DNA, 25 bp, synthetic construct
  source 1..25: mol_type = other DNA
ccccgtgtgagccccagcccggctc

SEQ ID NO: 1206 - DNA, 25 bp, synthetic construct
  source 1..25: mol_type = other DNA
cccccgtgtgagccccagcccggct

SEQ ID NO: 1207 - DNA, 25 bp, synthetic construct
  source 1..25: mol_type = other DNA
gcccccgtgtgagccccagcccggc

SEQ ID NO: 1208 - DNA, 25 bp, synthetic construct
  source 1..25: mol_type = other DNA
agcccccgtgtgagccccagcccgg

SEQ ID NO: 1209 - DNA, 25 bp, synthetic construct
  source 1..25: mol_type = other DNA
gagcccccgtgtgagccccagcccg

SEQ ID NO: 1210 - DNA, 25 bp, synthetic construct
  source 1..25: mol_type = other DNA
ggagcccccgtgtgagccccagccc

SEQ ID NO: 1211 - DNA, 25 bp, synthetic construct
  source 1..25: mol_type = other DNA
gggagcccccgtgtgagccccagcc

SEQ ID NO: 1212 - DNA, 25 bp, synthetic construct
  source 1..25: mol_type = other DNA
cgggagcccccgtgtgagccccagc

SEQ ID NO: 1213 - DNA, 25 bp, synthetic construct
  source 1..25: mol_type = other DNA
gcgggagcccccgtgtgagccccag

SEQ ID NO: 1214 - DNA, 25 bp, synthetic construct
  source 1..25: mol_type = other DNA
cgcgggagcccccgtgtgagcccca

SEQ ID NO: 1215 - DNA, 25 bp, synthetic construct
  source 1..25: mol_type = other DNA
acgcgggagcccccgtgtgagcccc

SEQ ID NO: 1216 - DNA, 25 bp, synthetic construct
  source 1..25: mol_type = other DNA
cacgcgggagcccccgtgtgagccc

SEQ ID NO: 1217 - DNA, 25 bp, synthetic construct
  source 1..25: mol_type = other DNA
ccacgcgggagcccccgtgtgagcc

SEQ ID NO: 1218 - DNA, 25 bp, synthetic construct
  source 1..25: mol_type = other DNA
gccacgcgggagcccccgtgtgagc

SEQ ID NO: 1219 - DNA, 25 bp, synthetic construct
  source 1..25: mol_type = other DNA
ggccacgcgggagcccccgtgtgag

SEQ ID NO: 1220 - DNA, 25 bp, synthetic construct
  source 1..25: mol_type = other DNA
cggccacgcgggagcccccgtgtga

SEQ ID NO: 1221 - DNA, 25 bp, synthetic construct
  source 1..25: mol_type = other DNA
acggccacgcgggagcccccgtgtg

SEQ ID NO: 1222 - DNA, 25 bp, synthetic construct
  source 1..25: mol_type = other DNA
gacggccacgcgggagcccccgtgt

SEQ ID NO: 1223 - DNA, 25 bp, synthetic construct
  source 1..25: mol_type = other DNA
agacggccacgcgggagcccccgtg

SEQ ID NO: 1224 - DNA, 25 bp, synthetic construct
  source 1..25: mol_type = other DNA
gagacggccacgcgggagcccccgt

SEQ ID NO: 1225 - DNA, 25 bp, synthetic construct
  source 1..25: mol_type = other DNA
cgagacggccacgcgggagcccccg

SEQ ID NO: 1226 - DNA, 25 bp, synthetic construct
  source 1..25: mol_type = other DNA
ccgagacggccacgcgggagccccc

SEQ ID NO: 1227 - DNA, 25 bp, synthetic construct
  source 1..25: mol_type = other DNA
gccgagacggccacgcgggagcccc

SEQ ID NO: 1228 - DNA, 25 bp, synthetic construct
  source 1..25: mol_type = other DNA
cgccgagacggccacgcgggagccc

SEQ ID NO: 1229 - DNA, 25 bp, synthetic construct
  source 1..25: mol_type = other DNA
gcgccgagacggccacgcgggagcc

SEQ ID NO: 1230 - DNA, 25 bp, synthetic construct
  source 1..25: mol_type = other DNA
ggcgccgagacggccacgcgggagc

SEQ ID NO: 1231 - DNA, 25 bp, synthetic construct
  source 1..25: mol_type = other DNA
aggcgccgagacggccacgcgggag

SEQ ID NO: 1232 - DNA, 25 bp, synthetic construct
  source 1..25: mol_type = other DNA
caggcgccgagacggccacgcggga

SEQ ID NO: 1233 - DNA, 25 bp, synthetic construct
  source 1..25: mol_type = other DNA
gcaggcgccgagacggccacgcggg

SEQ ID NO: 1234 - DNA, 25 bp, synthetic construct
  source 1..25: mol_type = other DNA
cgcaggcgccgagacggccacgcgg

SEQ ID NO: 1235 - DNA, 25 bp, synthetic construct
  source 1..25: mol_type = other DNA
acgcaggcgccgagacggccacgcg

SEQ ID NO: 1236 - DNA, 25 bp, synthetic construct
  source 1..25: mol_type = other DNA
cacgcaggcgccgagacggccacgc

SEQ ID NO: 1237 - DNA, 25 bp, synthetic construct
  source 1..25: mol_type = other DNA
tcacgcaggcgccgagacggccacg

SEQ ID NO: 1238 - DNA, 25 bp, synthetic construct
  source 1..25: mol_type = other DNA
gtcacgcaggcgccgagacggccac

SEQ ID NO: 1239 - DNA, 25 bp, synthetic construct
  source 1..25: mol_type = other DNA
ggtcacgcaggcgccgagacggcca

SEQ ID NO: 1240 - DNA, 25 bp, synthetic construct
  source 1..25: mol_type = other DNA
aggtcacgcaggcgccgagacggcc

SEQ ID NO: 1241 - DNA, 25 bp, synthetic construct
  source 1..25: mol_type = other DNA
gaggtcacgcaggcgccgagacggc

SEQ ID NO: 1242 - DNA, 25 bp, synthetic construct
  source 1..25: mol_type = other DNA
ggaggtcacgcaggcgccgagacgg

SEQ ID NO: 1243 - DNA, 25 bp, synthetic construct
  source 1..25: mol_type = other DNA
gggaggtcacgcaggcgccgagacg

SEQ ID NO: 1244 - DNA, 25 bp, synthetic construct
  source 1..25: mol_type = other DNA
ggggaggtcacgcaggcgccgagac

SEQ ID NO: 1245 - DNA, 25 bp, synthetic construct
  source 1..25: mol_type = other DNA
cggggaggtcacgcaggcgccgaga

SEQ ID NO: 1246 - DNA, 25 bp, synthetic construct
  source 1..25: mol_type = other DNA
gcggggaggtcacgcaggcgccgag

SEQ ID NO: 1247 - DNA, 25 bp, synthetic construct
  source 1..25: mol_type = other DNA
ggcggggaggtcacgcaggcgccga

SEQ ID NO: 1248 - DNA, 25 bp, synthetic construct
  source 1..25: mol_type = other DNA
cggcggggaggtcacgcaggcgccg

SEQ ID NO: 1249 - DNA, 25 bp, synthetic construct
  source 1..25: mol_type = other DNA
ccggcggggaggtcacgcaggcgcc

SEQ ID NO: 1250 - DNA, 25 bp, synthetic construct
  source 1..25: mol_type = other DNA
gccggcggggaggtcacgcaggcgc

SEQ ID NO: 1251 - DNA, 25 bp, synthetic construct
  source 1..25: mol_type = other DNA
cgccggcggggaggtcacgcaggcg

SEQ ID NO: 1252 - DNA, 25 bp, synthetic construct
  source 1..25: mol_type = other DNA
ccgccggcggggaggtcacgcaggc

SEQ ID NO: 1253 - DNA, 25 bp, synthetic construct
  source 1..25: mol_type = other DNA
cccgccggcggggaggtcacgcagg

SEQ ID NO: 1254 - DNA, 6384 bp, Homo sapiens
  source 1..6384: mol_type = genomic DNA
gtgctgcccgcctagaaagggtgaagtggttgtttccgtgacggactgagtacgggtgcctgtcaggctcttgcggaagtccatgcgccattgggagggcctcggccgcggctctgtgcccttgctgctgagggccacttcctgggtcattcctggaccgggagccgggctggggctcacacgggggctcccgcgtggccgtctcggcgcctgcgtgacctccccgccggcgggatgtggcgactacgtcgggccgctgtggcctgtgaggtctgccagtctttagtgaaacacagctctggaataaaaggaagtttaccactacaaaaactacatctggtttcacgaagcatttatcattcacatcatcctaccttaaagcttcaacgaccccaattaaggacatcctttcagcagttctcttctctgacaaaccttcctttacgtaaactgaaattctctccaattaaatatggctaccagcctcgcaggaatttttggccagcaagattagctacgagactcttaaaacttcgctatctcatactaggatcggctgttgggggtggctacacagccaaaaagacttttgatcagtggaaagatatgataccggaccttagtgaatataaatggattgtgcctgacattgtgtgggaaattgatgagtatatcgattttggtcacaaattggttagtgaagtcataggagcttctgacctacttctcttgttaggttctccggaagaaacggcgtttagagcaacagatcgtggatctgaaagtgacaagcattttagaaagggtctgcttggtgagctcattctcttacaacaacaaattcaagagcatgaagaggaagcgcgcagagccgctggccaatatagcacgagctatgcccaacagaagcgcaaggtgtcagacaaagagaaaattgaccaacttcaggaagaacttctgcacactcagttgaagtatcagagaatcttggaacgattagaaaaggagaacaaagaattgagaaaattagtattgcagaaagatgacaaaggcattcatcatagaaagcttaagaaatctttgattgacatgtattctgaagttcttgatgttctctctgattatgatgccagttataatacgcaagatcatctgccacgggttgttgtggttggagatcagagtgctggaaagactagtgtgttggaaatgattgcccaagctcgaatattcccaagaggatctggggagatgatgacacgttctccagttaaggtgactctgagtgaaggtcctcaccatgtggccctatttaaagatagttctcgggagtttgatcttaccaaagaagaagatcttgcagcattaagacatgaaatagaacttcgaatgaggaaaaatgtgaaagaaggctgtaccgttagccctgagaccatatccttaaatgtaaaaggccctggactacagaggatggtgcttgttgacttaccaggtgtgattaatactgtgacatcaggcatggctcctgacacaaaggaaactattttcagtatcagcaaagcttacatgcagaatcctaatgccatcatactgtgtattcaagatggatctgtggatgctgaacgcagtattgttacagacttggtcagtcaaatggaccctcatggaaggagaaccatattcgttttgaccaaagtagacctggcagagaaaaatgtagccagtccaagcaggattcagcagataattgaaggaaagctcttcccaatgaaagctttaggttattttgctgttgtaacaggaaaagggaacagctctgaaagcattgaagctataagagaatatgaagaagagttttttcagaattcaaagctcctaaagacaagcatgctaaaggcacaccaagtgactacaagaaatttaagccttgcagtatcagactgcttttggaaaatggtacgagagtctgttgaacaacaggctgatagtttcaaagcaacacgttttaaccttgaaactgaatggaagaataactatcctcgcctgcgggaacttgaccggaatgaactatttgaaaaagctaaaaatgaaatccttgatgaagttatcagtctgagccaggttacaccaaaacattgggaggaaatccttcaacaatctttgtgggaaagagtatcaactcatgtgattgaaaacatctaccttccagctgcgcagaccatgaattcaggaacttttaacaccacagtggatatcaagcttaaacagtggactgataaacaacttcctaataaagcagtagaggttgcttgggagaccctacaagaagaattttcccgctttatgacagaaccgaaagggaaagagcatgatgacatatttgataaacttaaagaggctgttaaggaagaaagtattaaacgacacaagtggaatgactttgcggaggacagcttgagggttattcaacacaatgctttggaagaccgatccatatctgataaacagcaatgggatgcagctatttattttatggaagaggctctgcaggctcgtctcaaggatactgaaaatgcaattgaaaacatggtgggtccagactggaaaaagaggtggttatactggaagaatcggacccaagaacagtgtgttcacaatgaaaccaagaatgaattggagaagatgttgaaatgtaatgaggagcacccagcttatcttgcaagtgatgaaataaccacagtccggaagaaccttgaatcccgaggagtagaagtagatccaagcttgattaaggatacttggcatcaagtttatagaagacattttttaaaaacagctctaaaccattgtaacctttgtcgaagaggtttttattactaccaaaggcattttgtagattctgagttggaatgcaatgatgtggtcttgttttggcgtatacagcgcatgcttgctatcaccgcaaatactttaaggcaacaacttacaaatactgaagttaggcgattagagaaaaatgttaaagaggtattggaagattttgctgaagatggtgagaagaagattaaattgcttactggtaaacgcgttcaactggcggaagacctcaagaaagttagagaaattcaagaaaaacttgatgctttcattgaagctcttcatcaggagaaataaattaaaatcgtactcataatcagctctgcatacatctgaagaacaaaaacatcaacgtcttttgtccagcctctttttcttctgctgttccacctttctaaacatacaataaagtcatgggataaaaataatcgatgtatgttacgggcgctttaaccatcagctgcctctcgaatggaagaacagtggtaatggattaacatcctattttgttgtactaaagtgacaaatcggaataatataattggtatggccattaggttcagtccttgaagataagaaacttgttctctgtttgttgtcttatttgtggtggcactcgtttaatggattaactgaggttgctcaatgttcagtttcttttccagaaatacaatgctaggtgttttgaaataaaacttatatagcaattgtttaaagttatcaattgtatataaaatcacagtagcctgctaaatcattgtatgtgtctgtagtattctattcccagaaactatttgaccatgataattcagtttatattcaccacatgaaagaaaaatgggtaacagaagaacccttaaaacaggttaatttggattgtaacgttcagtgaaagaaatttcaacccttcatagccagcgaagaaatttgccttggaagccaagtcagtaccagcttacctatttgattcagttgctgttttctcactctctatatccatttgaaattgatttattttagatgttgtatacttacgttaggctttctgttaatagtggtttttctcctgttgacagagccaccggattatgacacaggatgaggaagattaaggataatcaattgactaatttcatttagaatattatcaaacatttcaactaggtatcagaaaaaggctttctttcataagactattttaaatagaaattatttcaacaattaaagtaatgttgaccatccccctctcagctgaataaagaaaaatttagttcaatttattgcaatttaattacaatactaccttcacaacattttcatgtgttttaaataaatattttttaattggctaaaggacattcaagcaaagaaatgctttctttacttaaaatgtctatctcatttgctgccttttcactaagcctttactttgttaataaaagtgtccattgtgtgatgtttttgattttacagtttgctaaatcttattttcttggagttgctttttggtaacagccccattgctactccccattttattgttttacatcaatgcatgcttcgttgtgatccctcaagatgtaacacttggtatgctcggttgaggatatgaaaaaatacttccgaaaccaggaattcaatgtatgtttgttttatactgtttgataagaaaagtaggtccagccttaagcagcacagatgcgctggtagatgcatagtcaggaactttttttatttcttttaggtctagggacaggagtgaatagaaagggaggagagctctattatgttctatacacagattaggagatgaccttactgggtacacccctctaaccagtgcttacaggttaatgcatgttaatgaatatttttgcagttgtaaagcataacaattacaactacacatctatttctaaagaataaaacaggaccatatttatttacttctgtcaactatagaaagaaagaccttcagctgtatttccacagatttctcccaaggaaaaggctaatattagtcactactgttatcacatccctttgtataagttttaaaaagagatggagggagatcttcatttctttgaggagatcagtattgtaacgtatgtgaatagatgataacaattaatattactaaaagtcccacatgagagtcctgacgccctctccatgccccacagtaatgtggcttctttcatgggtttttttttcttctttttagctgatctcatcctaagcatgctttatttttccttgaaagctaggtatttatcaactgcagatgttattgaaagaaaataaaattcagtctcaagagtaaaccctgtgtcttgtgtctgtagttcaaaagtcagaaatgattctaatttaaacaaaaagatactaaatatacagaagttaaattcgaactagccacagaatcatttgtttttatgtcagaatttgcaaagagtggagtggacaaagctctgtatggaagactgaacaactgtaaatagatgatatccaaacttaatttggctaggacttcaattttaaaaatcagtgtacctaggcagtgcacagcacgaaataagtggcccttgcagcttccccgtttaacccactgtgctatagttgcgggtggaacagtcaacctttctagtagtttatgatattgccctctttgtattcccattttctacagttttttccgcagacttctttctgcaaattattcagcctccaaatgcaaatgaatgatataaaaataagtagggaacatggcagagagtggtgcttcccagcctcacaatgtgggaatttgacataggatgagagtcagagtataggtttaaaagataaaatctttagttaataattttgtatttatttattctagatgtatgtatctgaggaaagaaatctggtatttttgctttccaataaaggggatcaaagtaatggtttttctctcagttctctaagctggtctatgttatagctctagcagtatggaaatgtgctttaaaatatgcttaccttttgaatgatcatggctatatgttgttgagatatttgaaacttaccttgttttcacttgtgcactgtgaatgaactttgtattatttttttaaaaccttcacattacgtgtagatattattgcaacttatattttgcctgagcttgatcaaaggtcatttgtgtagatgagtaattaaaaaatatttaaatcacattataattctattattggagagcatcttttaaatttttttctgttttaacgagggaaagagaaacctgtatacctagggtcattatttgaccccatagtataaccagattcatggtctaacaagctctcagtgtggcttttctctgaatgcttgaatttcacatgccttgcatttcacagttgtactccatggtcaaccggtgctttttttcacatcgtggtacttgtcaaaacattttgttattttccttggtaaaatatataaaaaaggttttctaatttc

SEQ ID NO: 1255 - DNA, 6330 bp, Homo sapiens
  source 1..6330: mol_type = genomic DNA
gtgctgcccgcctagaaagggtgaagtggttgtttccgtgacggactgagtacgggtgcctgtcaggctcttgcggaagtccatgcgccattgggagggcctcggccgcggctctgtgcccttgctgctgagggccacttcctgggtcattcctggaccgggagccgggctggggctcacacgggggctcccgcgtggccgtctcggcgcctgcgtgacctccccgccggcgggatgtggcgactacgtcgggccgctgtggcctgtgaggtctgccagtctttagtgaaacacagctctggaataaaaggaagtttaccactacaaaaactacatctggtttcacgaagcatttatcattcacatcatcctaccttaaagcttcaacgaccccaattaaggacatcctttcagcagttctcttctctgacaaaccttcctttacgtaaactgaaattctctccaattaaatatggctaccagcctcgcaggaatttttggccagcaagattagctacgagactcttaaaacttcgctatctcatactaggatcggctgttgggggtggctacacagccaaaaagacttttgatcagtggaaagatatgataccggaccttagtgaatataaatggattgtgcctgacattgtgtgggaaattgatgagtatatcgattttggttctccggaagaaacggcgtttagagcaacagatcgtggatctgaaagtgacaagcattttagaaagggtctgcttggtgagctcattctcttacaacaacaaattcaagagcatgaagaggaagcgcgcagagccgctggccaatatagcacgagctatgcccaacagaagcgcaaggtgtcagacaaagagaaaattgaccaacttcaggaagaacttctgcacactcagttgaagtatcagagaatcttggaacgattagaaaaggagaacaaagaattgagaaaattagtattgcagaaagatgacaaaggcattcatcatagaaagcttaagaaatctttgattgacatgtattctgaagttcttgatgttctctctgattatgatgccagttataatacgcaagatcatctgccacgggttgttgtggttggagatcagagtgctggaaagactagtgtgttggaaatgattgcccaagctcgaatattcccaagaggatctggggagatgatgacacgttctccagttaaggtgactctgagtgaaggtcctcaccatgtggccctatttaaagatagttctcgggagtttgatcttaccaaagaagaagatcttgcagcattaagacatgaaatagaacttcgaatgaggaaaaatgtgaaagaaggctgtaccgttagccctgagaccatatccttaaatgtaaaaggccctggactacagaggatggtgcttgttgacttaccaggtgtgattaatactgtgacatcaggcatggctcctgacacaaaggaaactattttcagtatcagcaaagcttacatgcagaatcctaatgccatcatactgtgtattcaagatggatctgtggatgctgaacgcagtattgttacagacttggtcagtcaaatggaccctcatggaaggagaaccatattcgttttgaccaaagtagacctggcagagaaaaatgtagccagtccaagcaggattcagcagataattgaaggaaagctcttcccaatgaaagctttaggttattttgctgttgtaacaggaaaagggaacagctctgaaagcattgaagctataagagaatatgaagaagagttttttcagaattcaaagctcctaaagacaagcatgctaaaggcacaccaagtgactacaagaaatttaagccttgcagtatcagactgcttttggaaaatggtacgagagtctgttgaacaacaggctgatagtttcaaagcaacacgttttaaccttgaaactgaatggaagaataactatcctcgcctgcgggaacttgaccggaatgaactatttgaaaaagctaaaaatgaaatccttgatgaagttatcagtctgagccaggttacaccaaaacattgggaggaaatccttcaacaatctttgtgggaaagagtatcaactcatgtgattgaaaacatctaccttccagctgcgcagaccatgaattcaggaacttttaacaccacagtggatatcaagcttaaacagtggactgataaacaacttcctaataaagcagtagaggttgcttgggagaccctacaagaagaattttcccgctttatgacagaaccgaaagggaaagagcatgatgacatatttgataaacttaaagaggctgttaaggaagaaagtattaaacgacacaagtggaatgactttgcggaggacagcttgagggttattcaacacaatgctttggaagaccgatccatatctgataaacagcaatgggatgcagctatttattttatggaagaggctctgcaggctcgtctcaaggatactgaaaatgcaattgaaaacatggtgggtccagactggaaaaagaggtggttatactggaagaatcggacccaagaacagtgtgttcacaatgaaaccaagaatgaattggagaagatgttgaaatgtaatgaggagcacccagcttatcttgcaagtgatgaaataaccacagtccggaagaaccttgaatcccgaggagtagaagtagatccaagcttgattaaggatacttggcatcaagtttatagaagacattttttaaaaacagctctaaaccattgtaacctttgtcgaagaggtttttattactaccaaaggcattttgtagattctgagttggaatgcaatgatgtggtcttgttttggcgtatacagcgcatgcttgctatcaccgcaaatactttaaggcaacaacttacaaatactgaagttaggcgattagagaaaaatgttaaagaggtattggaagattttgctgaagatggtgagaagaagattaaattgcttactggtaaacgcgttcaactggcggaagacctcaagaaagttagagaaattcaagaaaaacttgatgctttcattgaagctcttcatcaggagaaataaattaaaatcgtactcataatcagctctgcatacatctgaagaacaaaaacatcaacgtcttttgtccagcctctttttcttctgctgttccacctttctaaacatacaataaagtcatgggataaaaataatcgatgtatgttacgggcgctttaaccatcagctgcctctcgaatggaagaacagtggtaatggattaacatcctattttgttgtactaaagtgacaaatcggaataatataattggtatggccattaggttcagtccttgaagataagaaacttgttctctgtttgttgtcttatttgtggtggcactcgtttaatggattaactgaggttgctcaatgttcagtttcttttccagaaatacaatgctaggtgttttgaaataaaacttatatagcaattgtttaaagttatcaattgtatataaaatcacagtagcctgctaaatcattgtatgtgtctgtagtattctattcccagaaactatttgaccatgataattcagtttatattcaccacatgaaagaaaaatgggtaacagaagaacccttaaaacaggttaatttggattgtaacgttcagtgaaagaaatttcaacccttcatagccagcgaagaaatttgccttggaagccaagtcagtaccagcttacctatttgattcagttgctgttttctcactctctatatccatttgaaattgatttattttagatgttgtatacttacgttaggctttctgttaatagtggtttttctcctgttgacagagccaccggattatgacacaggatgaggaagattaaggataatcaattgactaatttcatttagaatattatcaaacatttcaactaggtatcagaaaaaggctttctttcataagactattttaaatagaaattatttcaacaattaaagtaatgttgaccatccccctctcagctgaataaagaaaaatttagttcaatttattgcaatttaattacaatactaccttcacaacattttcatgtgttttaaataaatattttttaattggctaaaggacattcaagcaaagaaatgctttctttacttaaaatgtctatctcatttgctgccttttcactaagcctttactttgttaataaaagtgtccattgtgtgatgtttttgattttacagtttgctaaatcttattttcttggagttgctttttggtaacagccccattgctactccccattttattgttttacatcaatgcatgcttcgttgtgatccctcaagatgtaacacttggtatgctcggttgaggatatgaaaaaatacttccgaaaccaggaattcaatgtatgtttgttttatactgtttgataagaaaagtaggtccagccttaagcagcacagatgcgctggtagatgcatagtcaggaactttttttatttcttttaggtctagggacaggagtgaatagaaagggaggagagctctattatgttctatacacagattaggagatgaccttactgggtacacccctctaaccagtgcttacaggttaatgcatgttaatgaatatttttgcagttgtaaagcataacaattacaactacacatctatttctaaagaataaaacaggaccatatttatttacttctgtcaactatagaaagaaagaccttcagctgtatttccacagatttctcccaaggaaaaggctaatattagtcactactgttatcacatccctttgtataagttttaaaaagagatggagggagatcttcatttctttgaggagatcagtattgtaacgtatgtgaatagatgataacaattaatattactaaaagtcccacatgagagtcctgacgccctctccatgccccacagtaatgtggcttctttcatgggtttttttttcttctttttagctgatctcatcctaagcatgctttatttttccttgaaagctaggtatttatcaactgcagatgttattgaaagaaaataaaattcagtctcaagagtaaaccctgtgtcttgtgtctgtagttcaaaagtcagaaatgattctaatttaaacaaaaagatactaaatatacagaagttaaattcgaactagccacagaatcatttgtttttatgtcagaatttgcaaagagtggagtggacaaagctctgtatggaagactgaacaactgtaaatagatgatatccaaacttaatttggctaggacttcaattttaaaaatcagtgtacctaggcagtgcacagcacgaaataagtggcccttgcagcttccccgtttaacccactgtgctatagttgcgggtggaacagtcaacctttctagtagtttatgatattgccctctttgtattcccattttctacagttttttccgcagacttctttctgcaaattattcagcctccaaatgcaaatgaatgatataaaaataagtagggaacatggcagagagtggtgcttcccagcctcacaatgtgggaatttgacataggatgagagtcagagtataggtttaaaagataaaatctttagttaataattttgtatttatttattctagatgtatgtatctgaggaaagaaatctggtatttttgctttccaataaaggggatcaaagtaatggtttttctctcagttctctaagctggtctatgttatagctctagcagtatggaaatgtgctttaaaatatgcttaccttttgaatgatcatggctatatgttgttgagatatttgaaacttaccttgttttcacttgtgcactgtgaatgaactttgtattatttttttaaaaccttcacattacgtgtagatattattgcaacttatattttgcctgagcttgatcaaaggtcatttgtgtagatgagtaattaaaaaatatttaaatcacattataattctattattggagagcatcttttaaatttttttctgttttaacgagggaaagagaaacctgtatacctagggtcattatttgaccccatagtataaccagattcatggtctaacaagctctcagtgtggcttttctctgaatgcttgaatttcacatgccttgcatttcacagttgtactccatggtcaaccggtgctttttttcacatcgtggtacttgtcaaaacattttgttattttccttggtaaaatatataaaaaaggttttctaatttc

SEQ ID NO: 1256 - DNA, 6328 bp, Homo sapiens
  source 1..6328: mol_type = genomic DNA
gtgctgcccgcctagaaagggtgaagtggttgtttccgtgacggactgagtacgggtgcctgtcaggctcttgcggaagtccatgcgccattgggagggcctcggccgcggctctgtgcccttgctgctgagggccacttcctgggtcattcctggaccgggagccgggctggggctcacacgggggctcccgcgtggccgtctcggcgcctgcgtgacctccccgccggcgggatgtggcgactacgtcgggccgctgtggcctgtgaggtctgccagtctttagtgaaacacagctctggaataaaaggaagtttaccactacaaaaactacatctggtttcacgaagcatttatcattcacatcatcctaccttaaagcttcaacgaccccaattaaggacatcctttcagcagttctcttctctgacaaaccttcctttacgtaaactgaaattctctccaattaaatatggctaccagcctcgcaggaatttttggccagcaagattagctacgagactcttaaaacttcgctatctcatactaggatcggctgttgggggtggctacacagccaaaaagacttttgatcagtggaaagatatgataccggaccttagtgaatataaatggattgtgcctgacattgtgtgggaaattgatgagtatatcgattttgagaaaattagaaaagcccttcctagttcagaagaccttgtaaagttagcaccagactttgacaagattgttgaaagccttagcttattgaaggacttttttacctcaggttctccggaagaaacggcgtttagagcaacagatcgtggatctgaaagtgacaagcattttagaaaggtgtcagacaaagagaaaattgaccaacttcaggaagaacttctgcacactcagttgaagtatcagagaatcttggaacgattagaaaaggagaacaaagaattgagaaaattagtattgcagaaagatgacaaaggcattcatcatagaaagcttaagaaatctttgattgacatgtattctgaagttcttgatgttctctctgattatgatgccagttataatacgcaagatcatctgccacgggttgttgtggttggagatcagagtgctggaaagactagtgtgttggaaatgattgcccaagctcgaatattcccaagaggatctggggagatgatgacacgttctccagttaaggtgactctgagtgaaggtcctcaccatgtggccctatttaaagatagttctcgggagtttgatcttaccaaagaagaagatcttgcagcattaagacatgaaatagaacttcgaatgaggaaaaatgtgaaagaaggctgtaccgttagccctgagaccatatccttaaatgtaaaaggccctggactacagaggatggtgcttgttgacttaccaggtgtgattaatactgtgacatcaggcatggctcctgacacaaaggaaactattttcagtatcagcaaagcttacatgcagaatcctaatgccatcatactgtgtattcaagatggatctgtggatgctgaacgcagtattgttacagacttggtcagtcaaatggaccctcatggaaggagaaccatattcgttttgaccaaagtagacctggcagagaaaaatgtagccagtccaagcaggattcagcagataattgaaggaaagctcttcccaatgaaagctttaggttattttgctgttgtaacaggaaaagggaacagctctgaaagcattgaagctataagagaatatgaagaagagttttttcagaattcaaagctcctaaagacaagcatgctaaaggcacaccaagtgactacaagaaatttaagccttgcagtatcagactgcttttggaaaatggtacgagagtctgttgaacaacaggctgatagtttcaaagcaacacgttttaaccttgaaactgaatggaagaataactatcctcgcctgcgggaacttgaccggaatgaactatttgaaaaagctaaaaatgaaatccttgatgaagttatcagtctgagccaggttacaccaaaacattgggaggaaatccttcaacaatctttgtgggaaagagtatcaactcatgtgattgaaaacatctaccttccagctgcgcagaccatgaattcaggaacttttaacaccacagtggatatcaagcttaaacagtggactgataaacaacttcctaataaagcagtagaggttgcttgggagaccctacaagaagaattttcccgctttatgacagaaccgaaagggaaagagcatgatgacatatttgataaacttaaagaggctgttaaggaagaaagtattaaacgacacaagtggaatgactttgcggaggacagcttgagggttattcaacacaatgctttggaagaccgatccatatctgataaacagcaatgggatgcagctatttattttatggaagaggctctgcaggctcgtctcaaggatactgaaaatgcaattgaaaacatggtgggtccagactggaaaaagaggtggttatactggaagaatcggacccaagaacagtgtgttcacaatgaaaccaagaatgaattggagaagatgttgaaatgtaatgaggagcacccagcttatcttgcaagtgatgaaataaccacagtccggaagaaccttgaatcccgaggagtagaagtagatccaagcttgattaaggatacttggcatcaagtttatagaagacattttttaaaaacagctctaaaccattgtaacctttgtcgaagaggtttttattactaccaaaggcattttgtagattctgagttggaatgcaatgatgtggtcttgttttggcgtatacagcgcatgcttgctatcaccgcaaatactttaaggcaacaacttacaaatactgaagttaggcgattagagaaaaatgttaaagaggtattggaagattttgctgaagatggtgagaagaagattaaattgcttactggtaaacgcgttcaactggcggaagacctcaagaaagttagagaaattcaagaaaaacttgatgctttcattgaagctcttcatcaggagaaataaattaaaatcgtactcataatcagctctgcatacatctgaagaacaaaaacatcaacgtcttttgtccagcctctttttcttctgctgttccacctttctaaacatacaataaagtcatgggataaaaataatcgatgtatgttacgggcgctttaaccatcagctgcctctcgaatggaagaacagtggtaatggattaacatcctattttgttgtactaaagtgacaaatcggaataatataattggtatggccattaggttcagtccttgaagataagaaacttgttctctgtttgttgtcttatttgtggtggcactcgtttaatggattaactgaggttgctcaatgttcagtttcttttccagaaatacaatgctaggtgttttgaaataaaacttatatagcaattgtttaaagttatcaattgtatataaaatcacagtagcctgctaaatcattgtatgtgtctgtagtattctattcccagaaactatttgaccatgataattcagtttatattcaccacatgaaagaaaaatgggtaacagaagaacccttaaaacaggttaatttggattgtaacgttcagtgaaagaaatttcaacccttcatagccagcgaagaaatttgccttggaagccaagtcagtaccagcttacctatttgattcagttgctgttttctcactctctatatccatttgaaattgatttattttagatgttgtatacttacgttaggctttctgttaatagtggtttttctcctgttgacagagccaccggattatgacacaggatgaggaagattaaggataatcaattgactaatttcatttagaatattatcaaacatttcaactaggtatcagaaaaaggctttctttcataagactattttaaatagaaattatttcaacaattaaagtaatgttgaccatccccctctcagctgaataaagaaaaatttagttcaatttattgcaatttaattacaatactaccttcacaacattttcatgtgttttaaataaatattttttaattggctaaaggacattcaagcaaagaaatgctttctttacttaaaatgtctatctcatttgctgccttttcactaagcctttactttgttaataaaagtgtccattgtgtgatgtttttgattttacagtttgctaaatcttattttcttggagttgctttttggtaacagccccattgctactccccattttattgttttacatcaatgcatgcttcgttgtgatccctcaagatgtaacacttggtatgctcggttgaggatatgaaaaaatacttccgaaaccaggaattcaatgtatgtttgttttatactgtttgataagaaaagtaggtccagccttaagcagcacagatgcgctggtagatgcatagtcaggaactttttttatttcttttaggtctagggacaggagtgaatagaaagggaggagagctctattatgttctatacacagattaggagatgaccttactgggtacacccctctaaccagtgcttacaggttaatgcatgttaatgaatatttttgcagttgtaaagcataacaattacaactacacatctatttctaaagaataaaacaggaccatatttatttacttctgtcaactatagaaagaaagaccttcagctgtatttccacagatttctcccaaggaaaaggctaatattagtcactactgttatcacatccctttgtataagttttaaaaagagatggagggagatcttcatttctttgaggagatcagtattgtaacgtatgtgaatagatgataacaattaatattactaaaagtcccacatgagagtcctgacgccctctccatgccccacagtaatgtggcttctttcatgggtttttttttcttctttttagctgatctcatcctaagcatgctttatttttccttgaaagctaggtatttatcaactgcagatgttattgaaagaaaataaaattcagtctcaagagtaaaccctgtgtcttgtgtctgtagttcaaaagtcagaaatgattctaatttaaacaaaaagatactaaatatacagaagttaaattcgaactagccacagaatcatttgtttttatgtcagaatttgcaaagagtggagtggacaaagctctgtatggaagactgaacaactgtaaatagatgatatccaaacttaatttggctaggacttcaattttaaaaatcagtgtacctaggcagtgcacagcacgaaataagtggcccttgcagcttccccgtttaacccactgtgctatagttgcgggtggaacagtcaacctttctagtagtttatgatattgccctctttgtattcccattttctacagttttttccgcagacttctttctgcaaattattcagcctccaaatgcaaatgaatgatataaaaataagtagggaacatggcagagagtggtgcttcccagcctcacaatgtgggaatttgacataggatgagagtcagagtataggtttaaaagataaaatctttagttaataattttgtatttatttattctagatgtatgtatctgaggaaagaaatctggtatttttgctttccaataaaggggatcaaagtaatggtttttctctcagttctctaagctggtctatgttatagctctagcagtatggaaatgtgctttaaaatatgcttaccttttgaatgatcatggctatatgttgttgagatatttgaaacttaccttgttttcacttgtgcactgtgaatgaactttgtattatttttttaaaaccttcacattacgtgtagatattattgcaacttatattttgcctgagcttgatcaaaggtcatttgtgtagatgagtaattaaaaaatatttaaatcacattataattctattattggagagcatcttttaaatttttttctgttttaacgagggaaagagaaacctgtatacctagggtcattatttgaccccatagtataaccagattcatggtctaacaagctctcagtgtggcttttctctgaatgcttgaatttcacatgccttgcatttcacagttgtactccatggtcaaccggtgctttttttcacatcgtggtacttgtcaaaacattttgttattttccttggtaaaatatataaaaaaggttttctaatttca

SEQ ID NO: 1257 - DNA, 6397 bp, Homo sapiens
  source 1..6397: mol_type = genomic DNA
ggactgagtacgggtgcctgtcaggctcttgcggaagtccatgcgccattgggagggcctcggccgcggctctgtgcccttgctgctgagggccacttcctgggtcattcctggaccgggagccgggctggggctcacacgggggctcccgcgtggccgtctcggcgcctgcgtgacctccccgccggcgggatgtggcgactacgtcgggccgctgtggcctgtgaggtctgccagtctttagtgaaacacagctctggaataaaaggaagtttaccactacaaaaactacatctggtttcacgaagcatttatcattcacatcatcctaccttaaagcttcaacgaccccaattaaggacatcctttcagcagttctcttctctgacaaaccttcctttacgtaaactgaaattctctccaattaaatatggctaccagcctcgcaggaatttttggccagcaagattagctacgagactcttaaaacttcgctatctcatactaggatcggctgttgggggtggctacacagccaaaaagacttttgatcagtggaaagatatgataccggaccttagtgaatataaatggattgtgcctgacattgtgtgggaaattgatgagtatatcgattttgagaaaattagaaaagcccttcctagttcagaagaccttgtaaagttagcaccagactttgacaagattgttgaaagccttagcttattgaaggacttttttacctcaggttctccggaagaaacggcgtttagagcaacagatcgtggatctgaaagtgacaagcattttagaaagggtctgcttggtgagctcattctcttacaacaacaaattcaagagcatgaagaggaagcgcgcagagccgctggccaatatagcacgagctatgcccaacagaagcgcaaggtgtcagacaaagagaaaattgaccaacttcaggaagaacttctgcacactcagttgaagtatcagagaatcttggaacgattagaaaaggagaacaaagaattgagaaaattagtattgcagaaagatgacaaaggcattcatcatagaaagcttaagaaatctttgattgacatgtattctgaagttcttgatgttctctctgattatgatgccagttataatacgcaagatcatctgccacgggttgttgtggttggagatcagagtgctggaaagactagtgtgttggaaatgattgcccaagctcgaatattcccaagaggatctggggagatgatgacacgttctccagttaaggtgactctgagtgaaggtcctcaccatgtggccctatttaaagatagttctcgggagtttgatcttaccaaagaagaagatcttgcagcattaagacatgaaatagaacttcgaatgaggaaaaatgtgaaagaaggctgtaccgttagccctgagaccatatccttaaatgtaaaaggccctggactacagaggatggtgcttgttgacttaccaggtgtgattaatactgtgacatcaggcatggctcctgacacaaaggaaactattttcagtatcagcaaagcttacatgcagaatcctaatgccatcatactgtgtattcaagatggatctgtggatgctgaacgcagtattgttacagacttggtcagtcaaatggaccctcatggaaggagaaccatattcgttttgaccaaagtagacctggcagagaaaaatgtagccagtccaagcaggattcagcagataattgaaggaaagctcttcccaatgaaagctttaggttattttgctgttgtaacaggaaaagggaacagctctgaaagcattgaagctataagagaatatgaagaagagttttttcagaattcaaagctcctaaagacaagcatgctaaaggcacaccaagtgactacaagaaatttaagccttgcagtatcagactgcttttggaaaatggtacgagagtctgttgaacaacaggctgatagtttcaaagcaacacgttttaaccttgaaactgaatggaagaataactatcctcgcctgcgggaacttgaccggaatgaactatttgaaaaagctaaaaatgaaatccttgatgaagttatcagtctgagccaggttacaccaaaacattgggaggaaatccttcaacaatctttgtgggaaagagtatcaactcatgtgattgaaaacatctaccttccagctgcgcagaccatgaattcaggaacttttaacaccacagtggatatcaagcttaaacagtggactgataaacaacttcctaataaagcagtagaggttgcttgggagaccctacaagaagaattttcccgctttatgacagaaccgaaagggaaagagcatgatgacatatttgataaacttaaagaggctgttaaggaagaaagtattaaacgacacaagtggaatgactttgcggaggacagcttgagggttattcaacacaatgctttggaagaccgatccatatctgataaacagcaatgggatgcagctatttattttatggaagaggctctgcaggctcgtctcaaggatactgaaaatgcaattgaaaacatggtgggtccagactggaaaaagaggtggttatactggaagaatcggacccaagaacagtgtgttcacaatgaaaccaagaatgaattggagaagatgttgaaatgtaatgaggagcacccagcttatcttgcaagtgatgaaataaccacagtccggaagaaccttgaatcccgaggagtagaagtagatccaagcttgattaaggatacttggcatcaagtttatagaagacattttttaaaaacagctctaaaccattgtaacctttgtcgaagaggtttttattactaccaaaggcattttgtagattctgagttggaatgcaatgatgtggtcttgttttggcgtatacagcgcatgcttgctatcaccgcaaatactttaaggcaacaacttacaaatactgaagttaggcgattagagaaaaatgttaaagaggtattggaagattttgctgaagatggtgagaagaagattaaattgcttactggtaaacgcgttcaactggcggaagacctcaagaaagttagagaaattcaagaaaaacttgatgctttcattgaagctcttcatcaggagaaataaattaaaatcgtactcataatcagctctgcatacatctgaagaacaaaaacatcaacgtcttttgtccagcctctttttcttctgctgttccacctttctaaacatacaataaagtcatgggataaaaataatcgatgtatgttacgggcgctttaaccatcagctgcctctcgaatggaagaacagtggtaatggattaacatcctattttgttgtactaaagtgacaaatcggaataatataattggtatggccattaggttcagtccttgaagataagaaacttgttctctgtttgttgtcttatttgtggtggcactcgtttaatggattaactgaggttgctcaatgttcagtttcttttccagaaatacaatgctaggtgttttgaaataaaacttatatagcaattgtttaaagttatcaattgtatataaaatcacagtagcctgctaaatcattgtatgtgtctgtagtattctattcccagaaactatttgaccatgataattcagtttatattcaccacatgaaagaaaaatgggtaacagaagaacccttaaaacaggttaatttggattgtaacgttcagtgaaagaaatttcaacccttcatagccagcgaagaaatttgccttggaagccaagtcagtaccagcttacctatttgattcagttgctgttttctcactctctatatccatttgaaattgatttattttagatgttgtatacttacgttaggctttctgttaatagtggtttttctcctgttgacagagccaccggattatgacacaggatgaggaagattaaggataatcaattgactaatttcatttagaatattatcaaacatttcaactaggtatcagaaaaaggctttctttcataagactattttaaatagaaattatttcaacaattaaagtaatgttgaccatccccctctcagctgaataaagaaaaatttagttcaatttattgcaatttaattacaatactaccttcacaacattttcatgtgttttaaataaatattttttaattggctaaaggacattcaagcaaagaaatgctttctttacttaaaatgtctatctcatttgctgccttttcactaagcctttactttgttaataaaagtgtccattgtgtgatgtttttgattttacagtttgctaaatcttattttcttggagttgctttttggtaacagccccattgctactccccattttattgttttacatcaatgcatgcttcgttgtgatccctcaagatgtaacacttggtatgctcggttgaggatatgaaaaaatacttccgaaaccaggaattcaatgtatgtttgttttatactgtttgataagaaaagtaggtccagccttaagcagcacagatgcgctggtagatgcatagtcaggaactttttttatttcttttaggtctagggacaggagtgaatagaaagggaggagagctctattatgttctatacacagattaggagatgaccttactgggtacacccctctaaccagtgcttacaggttaatgcatgttaatgaatatttttgcagttgtaaagcataacaattacaactacacatctatttctaaagaataaaacaggaccatatttatttacttctgtcaactatagaaagaaagaccttcagctgtatttccacagatttctcccaaggaaaaggctaatattagtcactactgttatcacatccctttgtataagttttaaaaagagatggagggagatcttcatttctttgaggagatcagtattgtaacgtatgtgaatagatgataacaattaatattactaaaagtcccacatgagagtcctgacgccctctccatgccccacagtaatgtggcttctttcatgggtttttttttcttctttttagctgatctcatcctaagcatgctttatttttccttgaaagctaggtatttatcaactgcagatgttattgaaagaaaataaaattcagtctcaagagtaaaccctgtgtcttgtgtctgtagttcaaaagtcagaaatgattctaatttaaacaaaaagatactaaatatacagaagttaaattcgaactagccacagaatcatttgtttttatgtcagaatttgcaaagagtggagtggacaaagctctgtatggaagactgaacaactgtaaatagatgatatccaaacttaatttggctaggacttcaattttaaaaatcagtgtacctaggcagtgcacagcacgaaataagtggcccttgcagcttccccgtttaacccactgtgctatagttgcgggtggaacagtcaacctttctagtagtttatgatattgccctctttgtattcccattttctacagttttttccgcagacttctttctgcaaattattcagcctccaaatgcaaatgaatgatataaaaataagtagggaacatggcagagagtggtgcttcccagcctcacaatgtgggaatttgacataggatgagagtcagagtataggtttaaaagataaaatctttagttaataattttgtatttatttattctagatgtatgtatctgaggaaagaaatctggtatttttgctttccaataaaggggatcaaagtaatggtttttctctcagttctctaagctggtctatgttatagctctagcagtatggaaatgtgctttaaaatatgcttaccttttgaatgatcatggctatatgttgttgagatatttgaaacttaccttgttttcacttgtgcactgtgaatgaactttgtattatttttttaaaaccttcacattacgtgtagatattattgcaacttatattttgcctgagcttgatcaaaggtcatttgtgtagatgagtaattaaaaaatatttaaatcacattataattctattattggagagcatcttttaaatttttttctgttttaacgagggaaagagaaacctgtatacctagggtcattatttgaccccatagtataaccagattcatggtctaacaagctctcagtgtggcttttctctgaatgcttgaatttcacatgccttgcatttcacagttgtactccatggtcaaccggtgctttttttcacatcgtggtacttgtcaaaacattttgttattttccttggtaaaatatataaaaaaggttttctaatttca

SEQ ID NO: 1258 - DNA, 6429 bp, Homo sapiens
  source 1..6429: mol_type = genomic DNA
aggctcttgcggaagtccatgcgccattgggagggcctcggccgcggctctgtgcccttgctgctgagggccacttcctgggtcattcctggaccgggagccgggctggggctcacacgggggctcccgcgtggccgtctcggcgcctgcgtgacctccccgccggcgggatgtggcgactacgtcgggccgctgtggcctgtgaggtctgccagtctttagtgaaacacagctctggaataaaaggaagtttaccactacaaaaactacatctggtttcacgaagcatttatcattcacatcatcctaccttaaagcttcaacgaccccaattaaggacatcctttcagcagttctcttctctgacaaaccttcctttacgtaaactgaaattctctccaattaaatatggctaccagcctcgcaggaatttttggccagcaagattagctacgagactcttaaaacttcgctatctcatactaggatcggctgttgggggtggctacacagccaaaaagacttttgatcagtggaaagatatgataccggaccttagtgaatataaatggattgtgcctgacattgtgtgggaaattgatgagtatatcgattttgagaaaattagaaaagcccttcctagttcagaagaccttgtaaagttagcaccagactttgacaagattgttgaaagccttagcttattgaaggacttttttacctcaggtcacaaattggttagtgaagtcataggagcttctgacctacttctcttgttaggttctccggaagaaacggcgtttagagcaacagatcgtggatctgaaagtgacaagcattttagaaagggtctgcttggtgagctcattctcttacaacaacaaattcaagagcatgaagaggaagcgcgcagagccgctggccaatatagcacgagctatgcccaacagaagcgcaaggtgtcagacaaagagaaaattgaccaacttcaggaagaacttctgcacactcagttgaagtatcagagaatcttggaacgattagaaaaggagaacaaagaattgagaaaattagtattgcagaaagatgacaaaggcattcatcatagaaagcttaagaaatctttgattgacatgtattctgaagttcttgatgttctctctgattatgatgccagttataatacgcaagatcatctgccacgggttgttgtggttggagatcagagtgctggaaagactagtgtgttggaaatgattgcccaagctcgaatattcccaagaggatctggggagatgatgacacgttctccagttaaggtgactctgagtgaaggtcctcaccatgtggccctatttaaagatagttctcgggagtttgatcttaccaaagaagaagatcttgcagcattaagacatgaaatagaacttcgaatgaggaaaaatgtgaaagaaggctgtaccgttagccctgagaccatatccttaaatgtaaaaggccctggactacagaggatggtgcttgttgacttaccaggtgtgattaatactgtgacatcaggcatggctcctgacacaaaggaaactattttcagtatcagcaaagcttacatgcagaatcctaatgccatcatactgtgtattcaagatggatctgtggatgctgaacgcagtattgttacagacttggtcagtcaaatggaccctcatggaaggagaaccatattcgttttgaccaaagtagacctggcagagaaaaatgtagccagtccaagcaggattcagcagataattgaaggaaagctcttcccaatgaaagctttaggttattttgctgttgtaacaggaaaagggaacagctctgaaagcattgaagctataagagaatatgaagaagagttttttcagaattcaaagctcctaaagacaagcatgctaaaggcacaccaagtgactacaagaaatttaagccttgcagtatcagactgcttttggaaaatggtacgagagtctgttgaacaacaggctgatagtttcaaagcaacacgttttaaccttgaaactgaatggaagaataactatcctcgcctgcgggaacttgaccggaatgaactatttgaaaaagctaaaaatgaaatccttgatgaagttatcagtctgagccaggttacaccaaaacattgggaggaaatccttcaacaatctttgtgggaaagagtatcaactcatgtgattgaaaacatctaccttccagctgcgcagaccatgaattcaggaacttttaacaccacagtggatatcaagcttaaacagtggactgataaacaacttcctaataaagcagtagaggttgcttgggagaccctacaagaagaattttcccgctttatgacagaaccgaaagggaaagagcatgatgacatatttgataaacttaaagaggctgttaaggaagaaagtattaaacgacacaagtggaatgactttgcggaggacagcttgagggttattcaacacaatgctttggaagaccgatccatatctgataaacagcaatgggatgcagctatttattttatggaagaggctctgcaggctcgtctcaaggatactgaaaatgcaattgaaaacatggtgggtccagactggaaaaagaggtggttatactggaagaatcggacccaagaacagtgtgttcacaatgaaaccaagaatgaattggagaagatgttgaaatgtaatgaggagcacccagcttatcttgcaagtgatgaaataaccacagtccggaagaaccttgaatcccgaggagtagaagtagatccaagcttgattaaggatacttggcatcaagtttatagaagacattttttaaaaacagctctaaaccattgtaacctttgtcgaagaggtttttattactaccaaaggcattttgtagattctgagttggaatgcaatgatgtggtcttgttttggcgtatacagcgcatgcttgctatcaccgcaaatactttaaggcaacaacttacaaatactgaagttaggcgattagagaaaaatgttaaagaggtattggaagattttgctgaagatggtgagaagaagattaaattgcttactggtaaacgcgttcaactggcggaagacctcaagaaagttagagaaattcaagaaaaacttgatgctttcattgaagctcttcatcaggagaaataaattaaaatcgtactcataatcagctctgcatacatctgaagaacaaaaacatcaacgtcttttgtccagcctctttttcttctgctgttccacctttctaaacatacaataaagtcatgggataaaaataatcgatgtatgttacgggcgctttaaccatcagctgcctctcgaatggaagaacagtggtaatggattaacatcctattttgttgtactaaagtgacaaatcggaataatataattggtatggccattaggttcagtccttgaagataagaaacttgttctctgtttgttgtcttatttgtggtggcactcgtttaatggattaactgaggttgctcaatgttcagtttcttttccagaaatacaatgctaggtgttttgaaataaaacttatatagcaattgtttaaagttatcaattgtatataaaatcacagtagcctgctaaatcattgtatgtgtctgtagtattctattcccagaaactatttgaccatgataattcagtttatattcaccacatgaaagaaaaatgggtaacagaagaacccttaaaacaggttaatttggattgtaacgttcagtgaaagaaatttcaacccttcatagccagcgaagaaatttgccttggaagccaagtcagtaccagcttacctatttgattcagttgctgttttctcactctctatatccatttgaaattgatttattttagatgttgtatacttacgttaggctttctgttaatagtggtttttctcctgttgacagagccaccggattatgacacaggatgaggaagattaaggataatcaattgactaatttcatttagaatattatcaaacatttcaactaggtatcagaaaaaggctttctttcataagactattttaaatagaaattatttcaacaattaaagtaatgttgaccatccccctctcagctgaataaagaaaaatttagttcaatttattgcaatttaattacaatactaccttcacaacattttcatgtgttttaaataaatattttttaattggctaaaggacattcaagcaaagaaatgctttctttacttaaaatgtctatctcatttgctgccttttcactaagcctttactttgttaataaaagtgtccattgtgtgatgtttttgattttacagtttgctaaatcttattttcttggagttgctttttggtaacagccccattgctactccccattttattgttttacatcaatgcatgcttcgttgtgatccctcaagatgtaacacttggtatgctcggttgaggatatgaaaaaatacttccgaaaccaggaattcaatgtatgtttgttttatactgtttgataagaaaagtaggtccagccttaagcagcacagatgcgctggtagatgcatagtcaggaactttttttatttcttttaggtctagggacaggagtgaatagaaagggaggagagctctattatgttctatacacagattaggagatgaccttactgggtacacccctctaaccagtgcttacaggttaatgcatgttaatgaatatttttgcagttgtaaagcataacaattacaactacacatctatttctaaagaataaaacaggaccatatttatttacttctgtcaactatagaaagaaagaccttcagctgtatttccacagatttctcccaaggaaaaggctaatattagtcactactgttatcacatccctttgtataagttttaaaaagagatggagggagatcttcatttctttgaggagatcagtattgtaacgtatgtgaatagatgataacaattaatattactaaaagtcccacatgagagtcctgacgccctctccatgccccacagtaatgtggcttctttcatgggtttttttttcttctttttagctgatctcatcctaagcatgctttatttttccttgaaagctaggtatttatcaactgcagatgttattgaaagaaaataaaattcagtctcaagagtaaaccctgtgtcttgtgtctgtagttcaaaagtcagaaatgattctaatttaaacaaaaagatactaaatatacagaagttaaattcgaactagccacagaatcatttgtttttatgtcagaatttgcaaagagtggagtggacaaagctctgtatggaagactgaacaactgtaaatagatgatatccaaacttaatttggctaggacttcaattttaaaaatcagtgtacctaggcagtgcacagcacgaaataagtggcccttgcagcttccccgtttaacccactgtgctatagttgcgggtggaacagtcaacctttctagtagtttatgatattgccctctttgtattcccattttctacagttttttccgcagacttctttctgcaaattattcagcctccaaatgcaaatgaatgatataaaaataagtagggaacatggcagagagtggtgcttcccagcctcacaatgtgggaatttgacataggatgagagtcagagtataggtttaaaagataaaatctttagttaataattttgtatttatttattctagatgtatgtatctgaggaaagaaatctggtatttttgctttccaataaaggggatcaaagtaatggtttttctctcagttctctaagctggtctatgttatagctctagcagtatggaaatgtgctttaaaatatgcttaccttttgaatgatcatggctatatgttgttgagatatttgaaacttaccttgttttcacttgtgcactgtgaatgaactttgtattatttttttaaaaccttcacattacgtgtagatattattgcaacttatattttgcctgagcttgatcaaaggtcatttgtgtagatgagtaattaaaaaatatttaaatcacattataattctattattggagagcatcttttaaatttttttctgttttaacgagggaaagagaaacctgtatacctagggtcattatttgaccccatagtataaccagattcatggtctaacaagctctcagtgtggcttttctctgaatgcttgaatttcacatgccttgcatttcacagttgtactccatggtcaaccggtgctttttttcacatcgtggtacttgtcaaaacattttgttattttccttggtaaaatatataaaaaaggttttctaatttca

SEQ ID NO: 1259 - DNA, 3579 bp, Homo sapiens
  source 1..3579: mol_type = genomic DNA
aagtccatgcgccattgggagggcctcggccgcggctctgtgcccttgctgctgagggccacttcctgggtcattcctggaccgggagccgggctggggctcacacgggggctcccgcgtggccgtctcggcgcctgcgtgacctccccgccggcgggatgtggcgactacgtcgggccgctgtggcctgtgaggtctgccagtctttagtgaaacacagctctggaataaaaggaagtttaccactacaaaaactacatctggtttcacgaagcatttatcattcacatcatcctaccttaaagcttcaacgaccccaattaaggacatcctttcagcagttctcttctctgacaaaccttcctttacgtaaactgaaattctctccaattaaatatggctaccagcctcgcaggaatttttggccagcaagattagctacgagactcttaaaacttcgctatctcatactaggatcggctgttgggggtggctacacagccaaaaagacttttgatcagtggaaagatatgataccggaccttagtgaatataaatggattgtgcctgacattgtgtgggaaattgatgagtatatcgattttgagaaaattagaaaagcccttcctagttcagaagaccttgtaaagttagcaccagactttgacaagattgttgaaagccttagcttattgaaggacttttttacctcaggttctccggaagaaacggcgtttagagcaacagatcgtggatctgaaagtgacaagcattttagaaaggtgtcagacaaagagaaaattgaccaacttcaggaagaacttctgcacactcagttgaagtatcagagaatcttggaacgattagaaaaggagaacaaagaattgagaaaattagtattgcagaaagatgacaaaggcattcatcatagaaagcttaagaaatctttgattgacatgtattctgaagttcttgatgttctctctgattatgatgccagttataatacgcaagatcatctgccacgggttgttgtggttggagatcagagtgctggaaagactagtgtgttggaaatgattgcccaagctcgaatattcccaagaggatctggggagatgatgacacgttctccagttaaggtgactctgagtgaaggtcctcaccatgtggccctatttaaagatagttctcgggagtttgatcttaccaaagaagaagatcttgcagcattaagacatgaaatagaacttcgaatgaggaaaaatgtgaaagaaggctgtaccgttagccctgagaccatatccttaaatgtaaaaggccctggactacagaggatggtgcttgttgacttaccaggtgtgattaatactgtgacatcaggcatggctcctgacacaaaggaaactattttcagtatcagcaaagcttacatgcagaatcctaatgccatcatactgtgtattcaagatggatctgtggatgctgaacgcagtattgttacagacttggtcagtcaaatggaccctcatggaaggagaaccatattcgttttgaccaaagtagacctggcagagaaaaatgtagccagtccaagcaggattcagcagataattgaaggaaagctcttcccaatgaaagctttaggttattttgctgttgtaacaggaaaagggaacagctctgaaagcattgaagctataagagaatatgaagaagagttttttcagaattcaaagctcctaaagacaagcatgctaaaggcacaccaagtgactacaagaaatttaagccttgcagtatcagactgcttttggaaaatggtacgagagtctgttgaacaacaggctgatagtttcaaagcaacacgttttaaccttgaaactgaatggaagaataactatcctcgcctgcgggaacttgaccggaatgaactatttgaaaaagctaaaaatgaaatccttgatgaagttatcagtctgagccaggttacaccaaaacattgggaggaaatccttcaacaatctttgtgggaaagagtatcaactcatgtgattgaaaacatctaccttccagctgcgcagaccatgaattcaggaacttttaacaccacagtggatatcaagcttaaacagtggactgataaacaacttcctaataaagcagtagaggttgcttgggagaccctacaagaagaattttcccgctttatgacagaaccgaaagggaaagagcatgatgacatatttgataaacttaaagaggctgttaaggaagaaagtattaaacgacacaagtggaatgactttgcggaggacagcttgagggttattcaacacaatgctttggaagaccgatccatatctgataaacagcaatgggatgcagctatttattttatggaagaggctctgcaggctcgtctcaaggatactgaaaatgcaattgaaaacatggtgggtccagactggaaaaagaggtggttatactggaagaatcggacccaagaacagtgtgttcacaatgaaaccaagaatgaattggagaagatgttgaaatgtaatgaggagcacccagcttatcttgcaagtgatgaaataaccacagtccggaagaaccttgaatcccgaggagtagaagtagatccaagcttgattaaggatacttggcatcaagtttatagaagacattttttaaaaacagctctaaaccattgtaacctttgtcgaagaggtttttattactaccaaaggcattttgtagattctgagttggaatgcaatgatgtggtcttgttttggcgtatacagcgcatgcttgctatcaccgcaaatactttaaggcaacaacttacaaatactgaagttaggcgattagagaaaaatgttaaagaggtattggaagattttgctgaagatggtgagaagaagattaaattgcttactggtaaacgcgttcaactggcggaagacctcaaaatgttctttttccccagctcggactcaacactacacaccaggccaccacatggcgccgcacccagcattgacacttcttttaccttgtctgggctctgacatccgtgccaggttgctcttcgtcatggagtcccttttactgagctctgctctgacgctttgtgccaggtgcctctccatctcatccttcccacccgctagcctctgcccgaccccagacagattccttcctcacctgaagccagaccatgcctttgtggagataccctctttaccctgcctgtgcttcgccagcctgcaccaggccaccctcctgcacagatactctcctcagtactggaccaggctaccaacagccccatgtgaacccattgtaacccaggtcaggcattaacacctgcagtaggctaccatggcttccccttcccacccccctagcttggccctactaataatcactttgtcactgtttggggttgatatttggttgtttcttgtaggttcctagctttaagataggattgcatactaaaatttacttagatctttgagaactcaaggaaatcagtgaaacattattgttattaaataaaaataaaat

SEQ ID NO: 1260 - DNA, 5830 bp, Homo sapiens
  source 1..5830: mol_type = genomic DNA
ggccgcggctctgtgcccttgctgctgagggccacttcctgggtcattcctggaccgggagccgggctggggctcacacgggggctcccgcgtggccgtctcggcgcctgcgtgacctccccgccggcgggatgtggcgactacgtcgggccgctgtggcctgtgaggtctgccagtctttagtgaaacacagctctggaataaaaggaagtttaccactacaaaaactacatctggtttcacgaagcatttatcattcacatcatcctaccttaaagcttcaacgaccccaattaaggacatcctttcagcagttctcttctctgacaaaccttcctttacgtaaactgaaattctctccaattaaatatggctaccagcctcgcaggaatttttggccagcaagattagctacgagactcttaaaacttcgctatctcatactaggatcggctgttgggggtggctacacagccaaaaagacttttgatcagtggaaagatatgataccggaccttagtgaatataaatggattgtgcctgacattgtgtgggaaattgatgagtatatcgattttggttctccggaagaaacggcgtttagagcaacagatcgtggatctgaaagtgacaagcattttagaaaggtgtcagacaaagagaaaattgaccaacttcaggaagaacttctgcacactcagttgaagtatcagagaatcttggaacgattagaaaaggagaacaaagaattgagaaaattagtattgcagaaagatgacaaaggcattcatcatagaaagcttaagaaatctttgattgacatgtattctgaagttcttgatgttctctctgattatgatgccagttataatacgcaagatcatctgccacgggttgttgtggttggagatcagagtgctggaaagactagtgtgttggaaatgattgcccaagctcgaatattcccaagaggatctggggagatgatgacacgttctccagttaaggtgactctgagtgaaggtcctcaccatgtggccctatttaaagatagttctcgggagtttgatcttaccaaagaagaagatcttgcagcattaagacatgaaatagaacttcgaatgaggaaaaatgtgaaagaaggctgtaccgttagccctgagaccatatccttaaatgtaaaaggccctggactacagaggatggtgcttgttgacttaccaggtgtgattaatactgtgacatcaggcatggctcctgacacaaaggaaactattttcagtatcagcaaagcttacatgcagaatcctaatgccatcatactgtgtattcaagatggatctgtggatgctgaacgcagtattgttacagacttggtcagtcaaatggaccctcatggaaggagaaccatattcgttttgaccaaagtagacctggcagagaaaaatgtagccagtccaagcaggattcagcagataattgaaggaaagctcttcccaatgaaagctttaggttattttgctgttgtaacaggaaaagggaacagctctgaaagcattgaagctataagagaatatgaagaagagttttttcagaattcaaagctcctaaagacaagcatgctaaaggcacaccaagtgactacaagaaatttaagccttgcagtatcagactgcttttggaaaatggtacgagagtctgttgaacaacaggctgatagtttcaaagcaacacgttttaaccttgaaactgaatggaagaataactatcctcgcctgcgggaacttgaccggaatgaactatttgaaaaagctaaaaatgaaatccttgatgaagttatcagtctgagccaggttacaccaaaacattgggaggaaatccttcaacaatctttgtgggaaagagtatcaactcatgtgattgaaaacatctaccttccagctgcgcagaccatgaattcaggaacttttaacaccacagtggatatcaagcttaaacagtggactgataaacaacttcctaataaagcagtagaggttgcttgggagaccctacaagaagaattttcccgctttatgacagaaccgaaagggaaagagcatgatgacatatttgataaacttaaagaggctgttaaggaagaaagtattaaacgacacaagtggaatgactttgcggaggacagcttgagggttattcaacacaatgctttggaagaccgatccatatctgataaacagcaatgggatgcagctatttattttatggaagaggctctgcaggctcgtctcaaggatactgaaaatgcaattgaaaacatggtgggtccagactggaaaaagaggtggttatactggaagaatcggacccaagaacagtgtgttcacaatgaaaccaagaatgaattggagaagatgttgaaatgtaatgaggagcacccagcttatcttgcaagtgatgaaataaccacagtccggaagaaccttgaatcccgaggagtagaagtagatccaagcttgattaaggatacttggcatcaagtttatagaagacattttttaaaaacagctctaaaccattgtaacctttgtcgaagaggtttttattactaccaaaggcattttgtagattctgagttggaatgcaatgatgtggtcttgttttggcgtatacagcgcatgcttgctatcaccgcaaatactttaaggcaacaacttacaaatactgaagttaggcgattagagaaaaatgttaaagaggtattggaagattttgctgaagatggtgagaagaagattaaattgcttactggtaaacgcgttcaactggcggaagacctcaagaaagttagagaaattcaagaaaaacttgatgctttcattgaagctcttcatcaggagaaataaattaaaatcgtactcataatcagctctgcatacatctgaagaacaaaaacatcaacgtcttttgtccagcctctttttcttctgctgttccacctttctaaacatacaataaagtcatgggataaaaataatcgatgtatgttacgggcgctttaaccatcagctgcctctcgaatggaagaacagtggtaatggattaacatcctattttgttgtactaaagtgacaaatcggaataatataattggtatggccattaggttcagtccttgaagataagaaacttgttctctgtttgttgtcttatttgtggtggcactcgtttaatggattaactgaggttgctcaatgttcagtttcttttccagaaatacaatgctaggtgttttgaaataaaacttatatagcaattgtttaaagttatcaattgtatataaaatcacagtagcctgctaaatcattgtatgtgtctgtagtattctattcccagaaactatttgaccatgataattcagtttatattcaccacatgaaagaaaaatgggtaacagaagaacccttaaaacaggttaatttggattgtaacgttcagtgaaagaaatttcaacccttcatagccagcgaagaaatttgccttggaagccaagtcagtaccagcttacctatttgattcagttgctgttttctcactctctatatccatttgaaattgatttattttagatgttgtatacttacgttaggctttctgttaatagtggtttttctcctgttgacagagccaccggattatgacacaggatgaggaagattaaggataatcaattgactaatttcatttagaatattatcaaacatttcaactaggtatcagaaaaaggctttctttcataagactattttaaatagaaattatttcaacaattaaagtaatgttgaccatccccctctcagctgaataaagaaaaatttagttcaatttattgcaatttaattacaatactaccttcacaacattttcatgtgttttaaataaatattttttaattggctaaaggacattcaagcaaagaaatgctttctttacttaaaatgtctatctcatttgctgccttttcactaagcctttactttgttaataaaagtgtccattgtgtgatgtttttgattttacagtttgctaaatcttattttcttggagttgctttttggtaacagccccattgctactccccattttattgttttacatcaatgcatgcttcgttgtgatccctcaagatgtaacacttggtatgctcggttgaggatatgaaaaaatacttccgaaaccaggaattcaatgtatgtttgttttatactgtttgataagaaaagtaggtccagccttaagcagcacagatgcgctggtagatgcatagtcaggaactttttttatttcttttaggtctagggacaggagtgaatagaaagggaggagagctctattatgttctatacacagattaggagatgaccttactgggtacacccctctaaccagtgcttacaggttaatgcatgttaatgaatatttttgcagttgtaaagcataacaattacaactacacatctatttctaaagaataaaacaggaccatatttatttacttctgtcaactatagaaagaaagaccttcagctgtatttccacagatttctcccaaggaaaaggctaatattagtcactactgttatcacatccctttgtataagttttaaaaagagatggagggagatcttcatttctttgaggagatcagtattgtaacgtatgtgaatagatgataacaattaatattactaaaagtcccacatgagagtcctgacgccctctccatgccccacagtaatgtggcttctttcatgggtttttttttcttctttttagctgatctcatcctaagcatgctttatttttccttgaaagctaggtatttatcaactgcagatgttattgaaagaaaataaaattcagtctcaagagtaaaccctgtgtcttgtgtctgtagttcaaaagtcagaaatgattctaatttaaacaaaaagatactaaatatacagaagttaaattcgaactagccacagaatcatttgtttttatgtcagaatttgcaaagagtggagtggacaaagctctgtatggaagactgaacaactgtaaatagatgatatccaaacttaatttggctaggacttcaattttaaaaatcagtgtacctaggcagtgcacagcacgaaataagtggcccttgcagcttccccgtttaacccactgtgctatagttgcgggtggaacagtcaacctttctagtagtttatgatattgccctctttgtattcccattttctacagttttttccgcagacttctttctgcaaattattcagcctccaaatgcaaatgaatgatataaaaataagtagggaacatggcagagagtggtgcttcccagcctcacaatgtgggaatttgacataggatgagagtcagagtataggtttaaaagataaaatctttagttaataattttgtatttatttattctagatgtatgtatctgaggaaagaaatctggtatttttgctttccaataaaggggatcaaagtaatggtttttctctcagttctctaagctggtctatgttatagctctagcagtatggaaatgtgctttaaaatatgcttaccttttgaatgatcatggctatatgttgttgagatatttgaaacttaccttgttttcacttgtgcactgtgaatgaactttgtattatttttttaaaaccttcacattacgtgtagatattattgcaacttatattttgcctgagcttgatcaaaggtcatttgtgtagatgagtaattaaaaaatatttaaatc

SEQ ID NO: 1261 - DNA, 4087 bp, Homo sapiens
  source 1..4087: mol_type = genomic DNA
acttcctgggtcattcctggaccgggagccgggctggggctcacacgggggctcccgcgtggccgtctcggcgcctgcgtgacctccccgccggcgggatgtggcgactacgtcgggccgctgtggcctgtgaggtctgccagtctttagtgaaacacagctctggaataaaaggaagtttaccactacaaaaactacatctggtttcacgaagcatttatcattcacatcatcctaccttaaagcttcaacgaccccaattaaggacatcctttcagcagttctcttctctgacaaaccttcctttacgtaaactgaaattctctccaattaaatatggctaccagcctcgcaggaatttttggccagcaagattagctacgagactcttaaaacttcgctatctcatactaggatcggctgttgggggtggctacacagccaaaaagacttttgatcagtggaaagatatgataccggaccttagtgaatataaatggattgtgcctgacattgtgtgggaaattgatgagtatatcgattttgagaaaattagaaaagcccttcctagttcagaagaccttgtaaagttagcaccagactttgacaagattgttgaaagccttagcttattgaaggacttttttacctcaggtcacaaattggttagtgaagtcataggagcttctgacctacttctcttgttaggttctccggaagaaacggcgtttagagcaacagatcgtggatctgaaagtgacaagcattttagaaaggtgtcagacaaagagaaaattgaccaacttcaggaagaacttctgcacactcagttgaagtatcagagaatcttggaacgattagaaaaggagaacaaagaattgagaaaattagtattgcagaaagatgacaaaggcattcatcatagaaagcttaagaaatctttgattgacatgtattctgaagttcttgatgttctctctgattatgatgccagttataatacgcaagatcatctgccacgggttgttgtggttggagatcagagtgctggaaagactagtgtgttggaaatgattgcccaagctcgaatattcccaagaggatctggggagatgatgacacgttctccagttaaggtgactctgagtgaaggtcctcaccatgtggccctatttaaagatagttctcgggagtttgatcttaccaaagaagaagatcttgcagcattaagacatgaaatagaacttcgaatgaggaaaaatgtgaaagaaggctgtaccgttagccctgagaccatatccttaaatgtaaaaggccctggactacagaggatggtgcttgttgacttaccaggtgtgattaatactgtgacatcaggcatggctcctgacacaaaggaaactattttcagtatcagcaaagcttacatgcagaatcctaatgccatcatactgtgtattcaagatggatctgtggatgctgaacgcagtattgttacagacttggtcagtcaaatggaccctcatggaaggagaaccatattcgttttgaccaaagtagacctggcagagaaaaatgtagccagtccaagcaggattcagcagataattgaaggaaagctcttcccaatgaaagctttaggttattttgctgttgtaacaggaaaagggaacagctctgaaagcattgaagctataagagaatatgaagaagagttttttcagaattcaaagctcctaaagacaagcatgctaaaggcacaccaagtgactacaagaaatttaagccttgcagtatcagactgcttttggaaaatggtacgagagtctgttgaacaacaggctgatagtttcaaagcaacacgttttaaccttgaaactgaatggaagaataactatcctcgcctgcgggaacttgaccggaatgaactatttgaaaaagctaaaaatgaaatccttgatgaagttatcagtctgagccaggttacaccaaaacattgggaggaaatccttcaacaatctttgtgggaaagagtatcaactcatgtgattgaaaacatctaccttccagctgcgcagaccatgaattcaggaacttttaacaccacagtggatatcaagcttaaacagtggactgataaacaacttcctaataaagcagtagaggttgcttgggagaccctacaagaagaattttcccgctttatgacagaaccgaaagggaaagagcatgatgacatatttgataaacttaaagaggctgttaaggaagaaagtattaaacgacacaagtggaatgactttgcggaggacagcttgagggttattcaacacaatgctttggaagaccgatccatatctgataaacagcaatgggatgcagctatttattttatggaagaggctctgcaggctcgtctcaaggatactgaaaatgcaattgaaaacatggtgggtccagactggaaaaagaggtggttatactggaagaatcggacccaagaacagtgtgttcacaatgaaaccaagaatgaattggagaagatgttgaaatgtaatgaggagcacccagcttatcttgcaagtgatgaaataaccacagtccggaagaaccttgaatcccgaggagtagaagtagatccaagcttgattaaggatacttggcatcaagtttatagaagacattttttaaaaacagctctaaaccattgtaacctttgtcgaagaggtttttattactaccaaaggcattttgtagattctgagttggaatgcaatgatgtggtcttgttttggcgtatacagcgcatgcttgctatcaccgcaaatactttaaggcaacaacttacaaatactgaagttaggcgattagagaaaaatgttaaagaggtattggaagattttgctgaagatggtgagaagaagattaaattgcttactggtaaacgcgttcaactggcggaagacctcaagaaagttagagaaattcaagaaaaacttgatgctttcattgaagctcttcatcaggagaaataaattaaaatcgtactcataatcagctctgcatacatctgaagaacaaaaacatcaacgtcttttgtccagcctctttttcttctgctgttccacctttctaaacatacaataaagtcatgggataaaaataatcgatgtatgttacgggcgctttaaccatcagctgcctctcgaatggaagaacagtggtaatggattaacatcctattttgttgtactaaagtgacaaatcggaataatataattggtatggccattaggttcagtccttgaagataagaaacttgttctctgtttgttgtcttatttgtggtggcactcgtttaatggattaactgaggttgctcaatgttcagtttcttttccagaaatacaatgctaggtgttttgaaataaaacttatatagcaattgtttaaagttatcaattgtatataaaatcacagtagcctgctaaatcattgtatgtgtctgtagtattctattcccagaaactatttgaccatgataattcagtttatattcaccacatgaaagaaaaatgggtaacagaagaacccttaaaacaggttaatttggattgtaacgttcagtgaaagaaatttcaacccttcatagccagcgaagaaatttgccttggaagccaagtcagtaccagcttacctatttgattcagttgctgttttctcactctctatatccatttgaaattgatttattttagatgttgtatacttacgttaggctttctgttaatagtggtttttctcctgttgacagagccaccggattatgacacaggatgaggaagattaaggataatcaattgactaatttcatttagaatattatcaaacatttcaactaggtatcagaaaaaggctttctttcataagactattttaaatagaaattatttcaacaattaaagtaatgttgaccatccccctctcagctgaataaagaaaaatttagttcaatttattgcaatttaattacaatactaccttcacaacattttcatgtgttttaaataaatattttttaattggc

SEQ ID NO: 1262 - DNA, 5008 bp, Homo sapiens
  source 1..5008: mol_type = genomic DNA
gggtcattcctggaccgggagccgggctggggctcacacgggggctcccgcgtggccgtctcggcgcctgcgtgacctccccgccggcgggatgtggcgactacgtcgggccgctgtggcctgtgaggtctgccagtctttagtgaaacacagctctggaataaaaggaagtttaccactacaaaaactacatctggtttcacgaagcatttatcattcacatcatcctaccttaaagcttcaacgaccccaattaaggacatcctttcagcagttctcttctctgacaaaccttcctttacgtaaactgaaattctctccaattaaatatggctaccagcctcgcaggaatttttggccagcaagattagctacgagactcttaaaacttcgctatctcatactaggatcggctgttgggggtggctacacagccaaaaagacttttgatcagtggaaagatatgataccggaccttagtgaatataaatggattgtgcctgacattgtgtgggaaattgatgagtatatcgattttgagaaaattagaaaagcccttcctagttcagaagaccttgtaaagttagcaccagactttgacaagattgttgaaagccttagcttattgaaggacttttttacctcaggttctccggaagaaacggcgtttagagcaacagatcgtggatctgaaagtgacaagcattttagaaaggtgtcagacaaagagaaaattgaccaacttcaggaagaacttctgcacactcagagcaaaatttggaagttgaagtatcagagaatcttggaacgattagaaaaggagaacaaagaattgagaaaattagtattgcagaaagatgacaaaggcattcatcatagaaagcttaagaaatctttgattgacatgtattctgaagttcttgatgttctctctgattatgatgccagttataatacgcaagatcatctgccacgggttgttgtggttggagatcagagtgctggaaagactagtgtgttggaaatgattgcccaagctcgaatattcccaagaggatctggggagatgatgacacgttctccagttaaggtgactctgagtgaaggtcctcaccatgtggccctatttaaagatagttctcgggagtttgatcttaccaaagaagaagatcttgcagcattaagacatgaaatagaacttcgaatgaggaaaaatgtgaaagaaggctgtaccgttagccctgagaccatatccttaaatgtaaaaggccctggactacagaggatggtgcttgttgacttaccaggtgtgattaatactgtgacatcaggcatggctcctgacacaaaggaaactattttcagtatcagcaaagcttacatgcagaatcctaatgccatcatactgtgtattcaagatggatctgtggatgctgaacgcagtattgttacagacttggtcagtcaaatggaccctcatggaaggagaaccatattcgttttgaccaaagtagacctggcagagaaaaatgtagccagtccaagcaggattcagcagataattgaaggaaagctcttcccaatgaaagctttaggttattttgctgttgtaacaggaaaagggaacagctctgaaagcattgaagctataagagaatatgaagaagagttttttcagaattcaaagctcctaaagacaagcatgctaaaggcacaccaagtgactacaagaaatttaagccttgcagtatcagactgcttttggaaaatggtacgagagtctgttgaacaacaggctgatagtttcaaagcaacacgttttaaccttgaaactgaatggaagaataactatcctcgcctgcgggaacttgaccggaatgaactatttgaaaaagctaaaaatgaaatccttgatgaagttatcagtctgagccaggttacaccaaaacattgggaggaaatccttcaacaatctttgtgggaaagagtatcaactcatgtgattgaaaacatctaccttccagctgcgcagaccatgaattcaggaacttttaacaccacagtggatatcaagcttaaacagtggactgataaacaacttcctaataaagcagtagaggttgcttgggagaccctacaagaagaattttcccgctttatgacagaaccgaaagggaaagagcatgatgacatatttgataaacttaaagaggctgttaaggaagaaagtattaaacgacacaagtggaatgactttgcggaggacagcttgagggttattcaacacaatgctttggaagaccgatccatatctgataaacagcaatgggatgcagctatttattttatggaagaggctctgcaggctcgtctcaaggatactgaaaatgcaattgaaaacatggtgggtccagactggaaaaagaggtggttatactggaagaatcggacccaagaacagtgtgttcacaatgaaaccaagaatgaattggagaagatgttgaaatgtaatgaggagcacccagcttatcttgcaagtgatgaaataaccacagtccggaagaaccttgaatcccgaggagtagaagtagatccaagcttgattaaggatacttggcatcaagtttatagaagacattttttaaaaacagctctaaaccattgtaacctttgtcgaagaggtttttattactaccaaaggcattttgtagattctgagttggaatgcaatgatgtggtcttgttttggcgtatacagcgcatgcttgctatcaccgcaaatactttaaggcaacaacttacaaatactgaagttaggcgattagagaaaaatgttaaagaggtattggaagattttgctgaagatggtgagaagaagattaaattgcttactggtaaacgcgttcaactggcggaagacctcaagaaagttagagaaattcaagaaaaacttgatgctttcattgaagctcttcatcaggagaaataaattaaaatcgtactcataatcagctctgcatacatctgaagaacaaaaacatcaacgtcttttgtccagcctctttttcttctgctgttccacctttctaaacatacaataaagtcatgggataaaaataatcgatgtatgttacgggcgctttaaccatcagctgcctctcgaatggaagaacagtggtaatggattaacatcctattttgttgtactaaagtgacaaatcggaataatataattggtatggccattaggttcagtccttgaagataagaaacttgttctctgtttgttgtcttatttgtggtggcactcgtttaatggattaactgaggttgctcaatgttcagtttcttttccagaaatacaatgctaggtgttttgaaataaaacttatatagcaattgtttaaagttatcaattgtatataaaatcacagtagcctgctaaatcattgtatgtgtctgtagtattctattcccagaaactatttgaccatgataattcagtttatattcaccacatgaaagaaaaatgggtaacagaagaacccttaaaacaggttaatttggattgtaacgttcagtgaaagaaatttcaacccttcatagccagcgaagaaatttgccttggaagccaagtcagtaccagcttacctatttgattcagttgctgttttctcactctctatatccatttgaaattgatttattttagatgttgtatacttacgttaggctttctgttaatagtggtttttctcctgttgacagagccaccggattatgacacaggatgaggaagattaaggataatcaattgactaatttcatttagaatattatcaaacatttcaactaggtatcagaaaaaggctttctttcataagactattttaaatagaaattatttcaacaattaaagtaatgttgaccatccccctctcagctgaataaagaaaaatttagttcaatttattgcaatttaattacaatactaccttcacaacattttcatgtgttttaaataaatattttttaattggctaaaggacattcaagcaaagaaatgctttctttacttaaaatgtctatctcatttgctgccttttcactaagcctttactttgttaataaaagtgtccattgtgtgatgtttttgattttacagtttgctaaatcttattttcttggagttgctttttggtaacagccccattgctactccccattttattgttttacatcaatgcatgcttcgttgtgatccctcaagatgtaacacttggtatgctcggttgaggatatgaaaaaatacttccgaaaccaggaattcaatgtatgtttgttttatactgtttgataagaaaagtaggtccagccttaagcagcacagatgcgctggtagatgcatagtcaggaactttttttatttcttttaggtctagggacaggagtgaatagaaagggaggagagctctattatgttctatacacagattaggagatgaccttactgggtacacccctctaaccagtgcttacaggttaatgcatgttaatgaatatttttgcagttgtaaagcataacaattacaactacacatctatttctaaagaataaaacaggaccatatttatttacttctgtcaactatagaaagaaagaccttcagctgtatttccacagatttctcccaaggaaaaggctaatattagtcactactgttatcacatccctttgtataagttttaaaaagagatggagggagatcttcatttctttgaggagatcagtattgtaacgtatgtgaatagatgataacaattaatattactaaaagtcccacatgagagtcctgacgccctctccatgccccacagtaatgtggcttctttcatgggtttttttttcttctttttagctgatctcatcctaagcatgctttatttttccttgaaagctaggtatttatcaactgcagatgttattgaaagaaaataaaattcagtc

SEQ ID NO: 1263 - DNA, 234 bp, Homo sapiens
  source 1..234: mol_type = genomic DNA
gtgctgcccgcctagaaagggtgaagtggttgtttccgtgacggactgagtacgggtgcctgtcaggctcttgcggaagtccatgcgccattgggagggcctcggccgcggctctgtgcccttgctgctgagggccacttcctgggtcattcctggaccgggagccgggctggggctcacacgggggctcccgcgtggccgtctcggcgcctgcgtgacctccccgccggcggg

SEQ ID NO: 1264 - DNA, 234 bp, Homo sapiens; identical to SEQ ID NO: 1263
  source 1..234: mol_type = genomic DNA

SEQ ID NO: 1265 - DNA, 234 bp, Homo sapiens; identical to SEQ ID NO: 1263
  source 1..234: mol_type = genomic DNA

SEQ ID NO: 1266 - DNA, 192 bp, Homo sapiens
  source 1..192: mol_type = genomic DNA
ggactgagtacgggtgcctgtcaggctcttgcggaagtccatgcgccattgggagggcctcggccgcggctctgtgcccttgctgctgagggccacttcctgggtcattcctggaccgggagccgggctggggctcacacgggggctcccgcgtggccgtctcggcgcctgcgtgacctccccgccggcggg

SEQ ID NO: 1267 - DNA, 170 bp, Homo sapiens
  source 1..170: mol_type = genomic DNA
aggctcttgcggaagtccatgcgccattgggagggcctcggccgcggctctgtgcccttgctgctgagggccacttcctgggtcattcctggaccgggagccgggctggggctcacacgggggctcccgcgtggccgtctcggcgcctgcgtgacctccccgccggcggg

SEQ ID NO: 1268 - DNA, 158 bp, Homo sapiens
  source 1..158: mol_type = genomic DNA
aagtccatgcgccattgggagggcctcggccgcggctctgtgcccttgctgctgagggccacttcctgggtcattcctggaccgggagccgggctggggctcacacgggggctcccgcgtggccgtctcggcgcctgcgtgacctccccgccggcggg

SEQ ID NO: 1269 - DNA, 131 bp, Homo sapiens
  source 1..131: mol_type = genomic DNA
ggccgcggctctgtgcccttgctgctgagggccacttcctgggtcattcctggaccgggagccgggctggggctcacacgggggctcccgcgtggccgtctcggcgcctgcgtgacctccccgccggcggg

SEQ ID NO: 1270 - DNA, 98 bp, Homo sapiens
  source 1..98: mol_type = genomic DNA
acttcctgggtcattcctggaccgggagccgggctggggctcacacgggggctcccgcgtggccgtctcggcgcctgcgtgacctccccgccggcggg

SEQ ID NO: 1271 - DNA, 91 bp, Homo sapiens
  source 1..91: mol_type = genomic DNA
gggtcattcctggaccgggagccgggctggggctcacacgggggctcccgcgtggccgtctcggcgcctgcgtgacctccccgccggcggg

SEQ ID NO: 1272 - protein, 979 aa, Homo sapiens
MWRLRRAAVACEVCQSLVKHSSGIKGSLPLQKLHLVSRSIYHSHHPTLKLQRPQLRTSFQQFSSLTNLPLRKLKFSPIKYGYQPRRNFWPARLATRLLKLRYLILGSAVGGGYTAKKTFDQWKDMIPDLSEYKWIVPDIVWEIDEYIDFGHKLVSEVIGASDLLLLLGSPEETAFRATDRGSESDKHFRKGLLGELILLQQQIQEHEEEARRAAGQYSTSYAQQKRKVSDKEKIDQLQEELLHTQLKYQRILERLEKENKELRKLVLQKDDKGIHHRKLKKSLIDMYSEVLDVLSDYDASYNTQDHLPRVVVVGDQSAGKTSVLEMIAQARIFPRGSGEMMTRSPVKVTLSEGPHHVALFKDSSREFDLTKEEDLAALRHEIELRMRKNVKEGCTVSPETISLNVKGPGLQRMVLVDLPGVINTVTSGMAPDTKETIFSISKAYMQNPNAIILCIQDGSVDAERSIVTDLVSQMDPHGRRTIFVLTKVDLAEKNVASPSRIQQIIEGKLFPMKALGYFAVVTGKGNSSESIEAIREYEEEFFQNSKLLKTSMLKAHQVTTRNLSLAVSDCFWKMVRESVEQQADSFKATRFNLETEWKNNYPRLRELDRNELFEKAKNEILDEVISLSQVTPKHWEEILQQSLWERVSTHVIENIYLPAAQTMNSGTFNTTVDIKLKQWTDKQLPNKAVEVAWETLQEEFSRFMTEPKGKEHDDIFDKLKEAVKEESIKRHKWNDFAEDSLRVIQHNALEDRSISDKQQWDAAIYFMEEALQARLKDTENAIENMVGPDWKKRWLYWKNRTQEQCVHNETKNELEKMLKCNEEHPAYLASDEITTVRKNLESRGVEVDPSLIKDTWHQVYRRHFLKTALNHCNLCRRGFYYYQRHFVDSELECNDVVLFWRIQRMLAITANTLRQQLTNTEVRRLEKNVKEVLEDFAEDGEKKIKLLTGKRVQLAEDLKKVREIQEKLDAFIEALHQEK

SEQ ID NO: 1273 - protein, 961 aa, Homo sapiens
MWRLRRAAVACEVCQSLVKHSSGIKGSLPLQKLHLVSRSIYHSHHPTLKLQRPQLRTSFQQFSSLTNLPLRKLKFSPIKYGYQPRRNFWPARLATRLLKLRYLILGSAVGGGYTAKKTFDQWKDMIPDLSEYKWIVPDIVWEIDEYIDFGSPEETAFRATDRGSESDKHFRKGLLGELILLQQQIQEHEEEARRAAGQYSTSYAQQKRKVSDKEKIDQLQEELLHTQLKYQRILERLEKENKELRKLVLQKDDKGIHHRKLKKSLIDMYSEVLDVLSDYDASYNTQDHLPRVVVVGDQSAGKTSVLEMIAQARIFPRGSGEMMTRSPVKVTLSEGPHHVALFKDSSREFDLTKEEDLAALRHEIELRMRKNVKEGCTVSPETISLNVKGPGLQRMVLVDLPGVINTVTSGMAPDTKETIFSISKAYMQNPNAIILCIQDGSVDAERSIVTDLVSQMDPHGRRTIFVLTKVDLAEKNVASPSRIQQIIEGKLFPMKALGYFAVVTGKGNSSESIEAIREYEEEFFQNSKLLKTSMLKAHQVTTRNLSLAVSDCFWKMVRESVEQQADSFKATRFNLETEWKNNYPRLRELDRNELFEKAKNEILDEVISLSQVTPKHWEEILQQSLWERVSTHVIENIYLPAAQTMNSGTFNTTVDIKLKQWTDKQLPNKAVEVAWETLQEEFSRFMTEPKGKEHDDIFDKLKEAVKEESIKRHKWNDFAEDSLRVIQHNALEDRSISDKQQWDAAIYFMEEALQARLKDTENAIENMVGPDWKKRWLYWKNRTQEQCVHNETKNELEKMLKCNEEHPAYLASDEITTVRKNLESRGVEVDPSLIKDTWHQVYRRHFLKTALNHCNLCRRGFYYYQRHFVDSELECNDVVLFWRIQRMLAITANTLRQQLTNTEVRRLEKNVKEVLEDFAEDGEKKIKLLTGKRVQLAEDLKKVREIQEKLDAFIEALHQEK

SEQ ID NO: 1274 - protein, 960 aa, Homo sapiens
MWRLRRAAVACEVCQSLVKHSSGIKGSLPLQKLHLVSRSIYHSHHPTLKLQRPQLRTSFQQFSSLTNLPLRKLKFSPIKYGYQPRRNFWPARLATRLLKLRYLILGSAVGGGYTAKKTFDQWKDMIPDLSEYKWIVPDIVWEIDEYIDFEKIRKALPSSEDLVKLAPDFDKIVESLSLLKDFFTSGSPEETAFRATDRGSESDKHFRKVSDKEKIDQLQEELLHTQLKYQRILERLEKENKELRKLVLQKDDKGIHHRKLKKSLIDMYSEVLDVLSDYDASYNTQDHLPRVVVVGDQSAGKTSVLEMIAQARIFPRGSGEMMTRSPVKVTLSEGPHHVALFKDSSREFDLTKEEDLAALRHEIELRMRKNVKEGCTVSPETISLNVKGPGLQRMVLVDLPGVINTVTSGMAPDTKETIFSISKAYMQNPNAIILCIQDGSVDAERSIVTDLVSQMDPHGRRTIFVLTKVDLAEKNVASPSRIQQIIEGKLFPMKALGYFAVVTGKGNSSESIEAIREYEEEFFQNSKLLKTSMLKAHQVTTRNLSLAVSDCFWKMVRESVEQQADSFKATRFNLETEWKNNYPRLRELDRNELFEKAKNEILDEVISLSQVTPKHWEEILQQSLWERVSTHVIENIYLPAAQTMNSGTFNTTVDIKLKQWTDKQLPNKAVEVAWETLQEEFSRFMTEPKGKEHDDIFDKLKEAVKEESIKRHKWNDFAEDSLRVIQHNALEDRSISDKQQWDAAIYFMEEALQARLKDTENAIENMVGPDWKKRWLYWKNRTQEQCVHNETKNELEKMLKCNEEHPAYLASDEITTVRKNLESRGVEVDPSLIKDTWHQVYRRHFLKTALNHCNLCRRGFYYYQRHFVDSELECNDVVLFWRIQRMLAITANTLRQQLTNTEVRRLEKNVKEVLEDFAEDGEKKIKLLTGKRVQLAEDLKKVREIQEKLDAFIEALHQEK

SEQ ID NO: 1275 - protein, 997 aa, Homo sapiens
MWRLRRAAVACEVCQSLVKHSSGIKGSLPLQKLHLVSRSIYHSHHPTLKLQRPQLRTSFQQFSSLTNLPLRKLKFSPIKYGYQPRRNFWPARLATRLLKLRYLILGSAVGGGYTAKKTFDQWKDMIPDLSEYKWIVPDIVWEIDEYIDFEKIRKALPSSEDLVKLAPDFDKIVESLSLLKDFFTSGSPEETAFRATDRGSESDKHFRKGLLGELILLQQQIQEHEEEARRAAGQYSTSYAQQKRKVSDKEKIDQLQEELLHTQLKYQRILERLEKENKELRKLVLQKDDKGIHHRKLKKSLIDMYSEVLDVLSDYDASYNTQDHLPRVVVVGDQSAGKTSVLEMIAQARIFPRGSGEMMTRSPVKVTLSEGPHHVALFKDSSREFDLTKEEDLAALRHEIELRMRKNVKEGCTVSPETISLNVKGPGLQRMVLVDLPGVINTVTSGMAPDTKETIFSISKAYMQNPNAIILCIQDGSVDAERSIVTDLVSQMDPHGRRTIFVLTKVDLAEKNVASPSRIQQIIEGKLFPMKALGYFAVVTGKGNSSESIEAIREYEEEFFQNSKLLKTSMLKAHQVTTRNLSLAVSDCFWKMVRESVEQQADSFKATRFNLETEWKNNYPRLRELDRNELFEKAKNEILDEVISLSQVTPKHWEEILQQSLWERVSTHVIENIYLPAAQTMNSGTFNTTVDIKLKQWTDKQLPNKAVEVAWETLQEEFSRFMTEPKGKEHDDIFDKLKEAVKEESIKRHKWNDFAEDSLRVIQHNALEDRSISDKQQWDAAIYFMEEALQARLKDTENAIENMVGPDWKKRWLYWKNRTQEQCVHNETKNELEKMLKCNEEHPAYLASDEITTVRKNLESRGVEVDPSLIKDTWHQVYRRHFLKTALNHCNLCRRGFYYYQRHFVDSELECNDVVLFWRIQRMLAITANTLRQQLTNTEVRRLEKNVKEVLEDFAEDGEKKIKLLTGKRVQLAEDLKKVREIQEKLDAFIEALHQEK

SEQ ID NO: 1276 - protein, 1015 aa, Homo sapiens
MWRLRRAAVACEVCQSLVKHSSGIKGSLPLQKLHLVSRSIYHSHHPTLKLQRPQLRTSFQQFSSLTNLPLRKLKFSPIKYGYQPRRNFWPARLATRLLKLRYLILGSAVGGGYTAKKTFDQWKDMIPDLSEYKWIVPDIVWEIDEYIDFEKIRKALPSSEDLVKLAPDFDKIVESLSLLKDFFTSGHKLVSEVIGASDLLLLLGSPEETAFRATDRGSESDKHFRKGLLGELILLQQQIQEHEEEARRAAGQYSTSYAQQKRKVSDKEKIDQLQEELLHTQLKYQRILERLEKENKELRKLVLQKDDKGIHHRKLKKSLIDMYSEVLDVLSDYDASYNTQDHLPRVVVVGDQSAGKTSVLEMIAQARIFPRGSGEMMTRSPVKVTLSEGPHHVALFKDSSREFDLTKEEDLAALRHEIELRMRKNVKEGCTVSPETISLNVKGPGLQRMVLVDLPGVINTVTSGMAPDTKETIFSISKAYMQNPNAIILCIQDGSVDAERSIVTDLVSQMDPHGRRTIFVLTKVDLAEKNVASPSRIQQIIEGKLFPMKALGYFAVVTGKGNSSESIEAIREYEEEFFQNSKLLKTSMLKAHQVTTRNLSLAVSDCFWKMVRESVEQQADSFKATRFNLETEWKNNYPRLRELDRNELFEKAKNEILDEVISLSQVTPKHWEEILQQSLWERVSTHVIENIYLPAAQTMNSGTFNTTVDIKLKQWTDKQLPNKAVEVAWETLQEEFSRFMTEPKGKEHDDIFDKLKEAVKEESIKRHKWNDFAEDSLRVIQHNALEDRSISDKQQWDAAIYFMEEALQARLKDTENAIENMVGPDWKKRWLYWKNRTQEQCVHNETKNELEKMLKCNEEHPAYLASDEITTVRKNLESRGVEVDPSLIKDTWHQVYRRHFLKTALNHCNLCRRGFYYYQRHFVDSELECNDVVLFWRIQRMLAITANTLRQQLTNTEVRRLEKNVKEVLEDFAEDGEKKIKLLTGKRVQLAEDLKKVREIQEKLDAFIEALHQEK

SEQ ID NO: 1277 - protein, 972 aa, Homo sapiens
MWRLRRAAVACEVCQSLVKHSSGIKGSLPLQKLHLVSRSIYHSHHPTLKLQRPQLRTSFQQFSSLTNLPLRKLKFSPIKYGYQPRRNFWPARLATRLLKLRYLILGSAVGGGYTAKKTFDQWKDMIPDLSEYKWIVPDIVWEIDEYIDFEKIRKALPSSEDLVKLAPDFDKIVESLSLLKDFFTSGSPEETAFRATDRGSESDKHFRKVSDKEKIDQLQEELLHTQLKYQRILERLEKENKELRKLVLQKDDKGIHHRKLKKSLIDMYSEVLDVLSDYDASYNTQDHLPRVVVVGDQSAGKTSVLEMIAQARIFPRGSGEMMTRSPVKVTLSEGPHHVALFKDSSREFDLTKEEDLAALRHEIELRMRKNVKEGCTVSPETISLNVKGPGLQRMVLVDLPGVINTVTSGMAPDTKETIFSISKAYMQNPNAIILCIQDGSVDAERSIVTDLVSQMDPHGRRTIFVLTKVDLAEKNVASPSRIQQIIEGKLFPMKALGYFAVVTGKGNSSESIEAIREYEEEFFQNSKLLKTSMLKAHQVTTRNLSLAVSDCFWKMVRESVEQQADSFKATRFNLETEWKNNYPRLRELDRNELFEKAKNEILDEVISLSQVTPKHWEEILQQSLWERVSTHVIENIYLPAAQTMNSGTFNTTVDIKLKQWTDKQLPNKAVEVAWETLQEEFSRFMTEPKGKEHDDIFDKLKEAVKEESIKRHKWNDFAEDSLRVIQHNALEDRSISDKQQWDAAIYFMEEALQARLKDTENAIENMVGPDWKKRWLYWKNRTQEQCVHNETKNELEKMLKCNEEHPAYLASDEITTVRKNLESRGVEVDPSLIKDTWHQVYRRHFLKTALNHCNLCRRGFYYYQRHFVDSELECNDVVLFWRIQRMLAITANTLRQQLTNTEVRRLEKNVKEVLEDFAEDGEKKIKLLTGKRVQLAEDLKMFFFPSSDSTLHTRPPHGAAPSIDTSFTLSGL

SEQ ID NO: 1278 - protein, 924 aa, Homo sapiens
MWRLRRAAVACEVCQSLVKHSSGIKGSLPLQKLHLVSRSIYHSHHPTLKLQRPQLRTSFQQFSSLTNLPLRKLKFSPIKYGYQPRRNFWPARLATRLLKLRYLILGSAVGGGYTAKKTFDQWKDMIPDLSEYKWIVPDIVWEIDEYIDFGSPEETAFRATDRGSESDKHFRKVSDKEKIDQLQEELLHTQLKYQRILERLEKENKELRKLVLQKDDKGIHHRKLKKSLIDMYSEVLDVLSDYDASYNTQDHLPRVVVVGDQSAGKTSVLEMIAQARIFPRGSGEMMTRSPVKVTLSEGPHHVALFKDSSREFDLTKEEDLAALRHEIELRMRKNVKEGCTVSPETISLNVKGPGLQRMVLVDLPGVINTVTSGMAPDTKETIFSISKAYMQNPNAIILCIQDGSVDAERSIVTDLVSQMDPHGRRTIFVLTKVDLAEKNVASPSRIQQIIEGKLFPMKALGYFAVVTGKGNSSESIEAIREYEEEFFQNSKLLKTSMLKAHQVTTRNLSLAVSDCFWKMVRESVEQQADSFKATRFNLETEWKNNYPRLRELDRNELFEKAKNEILDEVISLSQVTPKHWEEILQQSLWERVSTHVIENIYLPAAQTMNSGTFNTTVDIKLKQWTDKQLPNKAVEVAWETLQEEFSRFMTEPKGKEHDDIFDKLKEAVKEESIKRHKWNDFAEDSLRVIQHNALEDRSISDKQQWDAAIYFMEEALQARLKDTENAIENMVGPDWKKRWLYWKNRTQEQCVHNETKNELEKMLKCNEEHPAYLASDEITTVRKNLESRGVEVDPSLIKDTWHQVYRRHFLKTALNHCNLCRRGFYYYQRHFVDSELECNDVVLFWRIQRMLAITANTLRQQLTNTEVRRLEKNVKEVLEDFAEDGEKKIKLLTGKRVQLAEDLKKVREIQEKLDAFIEALHQEK

SEQ ID NO: 1279 - protein, 978 aa, Homo sapiens
MWRLRRAAVACEVCQSLVKHSSGIKGSLPLQKLHLVSRSIYHSHHPTLKLQRPQLRTSFQQFSSLTNLPLRKLKFSPIKYGYQPRRNFWPARLATRLLKLRYLILGSAVGGGYTAKKTFDQWKDMIPDLSEYKWIVPDIVWEIDEYIDFEKIRKALPSSEDLVKLAPDFDKIVESLSLLKDFFTSGHKLVSEVIGASDLLLLLGSPEETAFRATDRGSESDKHFRKVSDKEKIDQLQEELLHTQLKYQRILERLEKENKELRKLVLQKDDKGIHHRKLKKSLIDMYSEVLDVLSDYDASYNTQDHLPRVVVVGDQSAGKTSVLEMIAQARIFPRGSGEMMTRSPVKVTLSEGPHHVALFKDSSREFDLTKEEDLAALRHEIELRMRKNVKEGCTVSPETISLNVKGPGLQRMVLVDLPGVINTVTSGMAPDTKETIFSISKAYMQNPNAIILCIQDGSVDAERSIVTDLVSQMDPHGRRTIFVLTKVDLAEKNVASPSRIQQIIEGKLFPMKALGYFAVVTGKGNSSESIEAIREYEEEFFQNSKLLKTSMLKAHQVTTRNLSLAVSDCFWKMVRESVEQQADSFKATRFNLETEWKNNYPRLRELDRNELFEKAKNEILDEVISLSQVTPKHWEEILQQSLWERVSTHVIENIYLPAAQTMNSGTFNTTVDIKLKQWTDKQLPNKAVEVAWETLQEEFSRFMTEPKGKEHDDIFDKLKEAVKEESIKRHKWNDFAEDSLRVIQHNALEDRSISDKQQWDAAIYFMEEALQARLKDTENAIENMVGPDWKKRWLYWKNRTQEQCVHNETKNELEKMLKCNEEHPAYLASDEITTVRKNLESRGVEVDPSLIKDTWHQVYRRHFLKTALNHCNLCRRGFYYYQRHFVDSELECNDVVLFWRIQRMLAITANTLRQQLTNTEVRRLEKNVKEVLEDFAEDGEKKIKLLTGKRVQLAEDLKKVREIQEKLDAFIEALHQEK

SEQ ID NO: 1280 - protein, 965 aa, Homo sapiens
MWRLRRAAVACEVCQSLVKHSSGIKGSLPLQKLHLVSRSIYHSHHPTLKLQRPQLRTSFQQFSSLTNLPLRKLKFSPIKYGYQPRRNFWPARLATRLLKLRYLILGSAVGGGYTAKKTFDQWKDMIPDLSEYKWIVPDIVWEIDEYIDFEKIRKALPSSEDLVKLAPDFDKIVESLSLLKDFFTSGSPEETAFRATDRGSESDKHFRKVSDKEKIDQLQEELLHTQSKIWKLKYQRILERLEKENKELRKLVLQKDDKGIHHRKLKKSLIDMYSEVLDVLSDYDASYNTQDHLPRVVVVGDQSAGKTSVLEMIAQARIFPRGSGEMMTRSPVKVTLSEGPHHVALFKDSSREFDLTKEEDLAALRHEIELRMRKNVKEGCTVSPETISLNVKGPGLQRMVLVDLPGVINTVTSGMAPDTKETIFSISKAYMQNPNAIILCIQDGSVDAERSIVTDLVSQMDPHGRRTIFVLTKVDLAEKNVASPSRIQQIIEGKLFPMKALGYFAVVTGKGNSSESIEAIREYEEEFFQNSKLLKTSMLKAHQVTTRNLSLAVSDCFWKMVRESVEQQADSFKATRFNLETEWKNNYPRLRELDRNELFEKAKNEILDEVISLSQVTPKHWEEILQQSLWERVSTHVIENIYLPAAQTMNSGTFNTTVDIKLKQWTDKQLPNKAVEVAWETLQEEFSRFMTEPKGKEHDDIFDKLKEAVKEESIKRHKWNDFAEDSLRVIQHNALEDRSISDKQQWDAAIYFMEEALQARLKDTENAIENMVGPDWKKRWLYWKNRTQEQCVHNETKNELEKMLKCNEEHPAYLASDEITTVRKNLESRGVEVDPSLIKDTWHQVYRRHFLKTALNHCNLCRRGFYYYQRHFVDSELECNDVVLFWRIQRMLAITANTLRQQLTNTEVRRLEKNVKEVLEDFAEDGEKKIKLLTGKRVQLAEDLKKVREIQEKLDAFIEALHQEK

SEQ ID NO: 1281 - protein, 10 aa, synthetic construct
  SITE 9: note = 6-aminohexanoic acid
  SITE 10: note = Beta-alanine
RRRRRRRRXA

SEQ ID NO: 1282 - protein, 14 aa, synthetic construct
  SITE 2: note = 6-aminohexanoic acid
  SITE 5: note = Beta-alanine
  SITE 8: note = 6-aminohexanoic acid
  SITE 11: note = Beta-alanine
  SITE 13: note = 6-aminohexanoic acid
  SITE 14: note = Beta-alanine
RXRRARRXRRARXA

SEQ ID NO: 1283 - protein, 14 aa, synthetic construct
  SITE 2: note = 6-aminohexanoic acid
  SITE 5: note = 6-aminohexanoic acid
  SITE 8: note = 6-aminohexanoic acid
  SITE 11: note = Beta-alanine
  SITE 13: note = 6-aminohexanoic acid
  SITE 14: note = Beta-alanine
RXRRXRRXRRARXA

SEQ ID NO: 1284 - protein, 17 aa, synthetic construct
  SITE 2: note = Beta-alanine
  SITE 4: note = Beta-alanine
  SITE 6: note = Beta-alanine
  SITE 8: note = Beta-alanine
  SITE 10: note = Beta-alanine
  SITE 12: note = 6-aminohexanoic acid
  SITE 14: note = Beta-alanine
  SITE 16: note = 6-aminohexanoic acid
  SITE 17: note = Beta-alanine
RARARARARARXRARXA

SEQ ID NO: 1285 - protein, 17 aa, synthetic construct
  SITE 2: note = Beta-alanine
  SITE 4: note = Beta-alanine
  SITE 6: note = Beta-alanine
  SITE 8: note = 6-aminohexanoic acid
  SITE 10: note = Beta-alanine
  SITE 12: note = Beta-alanine
  SITE 14: note = Beta-alanine
  SITE 16: note = 6-aminohexanoic acid
  SITE 17: note = 6-aminohexanoic acid
RARARARXRARARARXX

SEQ ID NO: 1286 - protein, 17 aa, synthetic construct
  SITE 1: note = 6-aminohexanoic acid
  SITE 3: note = Beta-alanine
  SITE 5: note = Beta-alanine
  SITE 7: note = Beta-alanine
  SITE 9: note = 6-aminohexanoic acid
  SITE 11: note = Beta-alanine
  SITE 13: note = Beta-alanine
  SITE 15: note = Beta-alanine
  SITE 17: note = 6-aminohexanoic acid
XRARARARXRARARARX

SEQ ID NO: 1287 - protein, 17 aa, synthetic construct
  SITE 2: note = Beta-alanine
  SITE 4: note = 6-aminohexanoic acid
  SITE 6: note = Beta-alanine
  SITE 8: note = 6-aminohexanoic acid
  SITE 10: note = Beta-alanine
  SITE 12: note = 6-aminohexanoic acid
  SITE 14: note = Beta-alanine
  SITE 16: note = 6-aminohexanoic acid
  SITE 17: note = Beta-alanine
RARXRARXRARXRARXA

SEQ ID NO: 1288 - protein, 17 aa, synthetic construct
  SITE 2: note = Beta-alanine
  SITE 4: note = Beta-alanine
  SITE 6: note = Beta-alanine
  SITE 8: note = Beta-alanine
  SITE 10: note = 6-aminohexanoic acid
  SITE 12: note = 6-aminohexanoic acid
  SITE 14: note = 6-aminohexanoic acid
  SITE 16: note = 6-aminohexanoic acid
  SITE 17: note = Beta-alanine
RARARARARXRXRXRXA

SEQ ID NO: 1289 - protein, 17 aa, synthetic construct
  SITE 2: note = 6-aminohexanoic acid
  SITE 4: note = Beta-alanine
  SITE 6: note = Beta-alanine
  SITE 8: note = 6-aminohexanoic acid
  SITE 10: note = Beta-alanine
  SITE 12: note = Beta-alanine
  SITE 14: note = Beta-alanine
  SITE 16: note = 6-aminohexanoic acid
  SITE 17: note = 6-aminohexanoic acid
RXRARARXRARARARXX

SEQ ID NO: 1290 - protein, 14 aa, synthetic construct
  SITE 1: note = D-Arginine
  SITE 2: note = 6-aminohexanoic acid
  SITE 3: note = D-Arginine
  SITE 4: note = D-Arginine
  SITE 5: note = 6-aminohexanoic acid
  SITE 6: note = D-Arginine
  SITE 7: note = D-Arginine
  SITE 8: note = 6-aminohexanoic acid
  SITE 9: note = D-Arginine
  SITE 10: note = D-Arginine
  SITE 11: note = 6-aminohexanoic acid
  SITE 12: note = D-Arginine
  SITE 13: note = 6-aminohexanoic acid
  SITE 14: note = Beta-alanine
RXRRXRRXRRXRXA

SEQ ID NO: 1291 - protein, 14 aa, synthetic construct
  SITE 2: note = 6-aminohexanoic acid
  SITE 5: note = 6-aminohexanoic acid
  SITE 8: note = 6-aminohexanoic acid
  SITE 11: note = 6-aminohexanoic acid
  SITE 13: note = 6-aminohexanoic acid
  SITE 14: note = Beta-alanine
RXRRXRRXRRXRXA

SEQ ID NO: 1292 - protein, 17 aa, synthetic construct
  SITE 2: note = Beta-alanine
  SITE 4: note = Beta-alanine
  SITE 6: note = Beta-alanine
  SITE 8: note = Beta-alanine
  SITE 10: note = Beta-alanine
  SITE 12: note = Beta-alanine
  SITE 14: note = Beta-alanine
  SITE 16: note = Beta-alanine
  SITE 17: note = Beta-alanine
RARARARARARARARAA

SEQ ID NO: 1293 - protein, 17 aa, synthetic construct
  SITE 2: note = Beta-alanine
  SITE 4: note = Beta-alanine
  SITE 6: note = Beta-alanine
  SITE 8: note = Beta-alanine
  SITE 10: note = Beta-alanine
  SITE 12: note = Beta-alanine
  SITE 14: note = Beta-alanine
  SITE 16: note = 6-aminohexanoic acid
  SITE 17: note = Beta-alanine
RARARARARARARARXA

SEQ ID NO: 1294 - protein, 17 aa, synthetic construct
  SITE 2: note = Beta-alanine
  SITE 4: note = Beta-alanine
  SITE 6: note = Beta-alanine
  SITE 8: note = Beta-alanine
  SITE 10: note = Beta-alanine
  SITE 12: note = Beta-alanine
  SITE 14: note = Beta-alanine
  SITE 16: note = Beta-alanine
  SITE 17: note = Beta-alanine
RARARARARARARARAA

SEQ ID NO: 1295 - protein, 22 aa, synthetic construct
RRSRTARAGRPGRNSSRPSAPR

SEQ ID NO: 1296 - protein, 10 aa, synthetic construct
  SITE 1: note = D-Arginine
  SITE 2: note = D-Arginine
  SITE 3: note = D-Arginine
  SITE 4: note = D-Arginine
  SITE 5: note = D-Arginine
  SITE 6: note = D-Arginine
  SITE 7: note = D-Arginine
  SITE 8: note = D-Arginine
  SITE 9: note = 6-aminohexanoic acid
  SITE 10: note = Beta-alanine
RRRRRRRRXA

SEQ ID NO: 1297 - protein, 11 aa, synthetic construct
  SITE 10: note = 6-aminohexanoic acid
  SITE 11: note = Beta-alanine
RRRRRRRRRXA

SEQ ID NO: 1298 - protein, 17 aa, synthetic construct
  SITE 2: note = 6-aminohexanoic acid
  SITE 4: note = 6-aminohexanoic acid
  SITE 6: note = 6-aminohexanoic acid
  SITE 8: note = 6-aminohexanoic acid
  SITE 10: note = 6-aminohexanoic acid
  SITE 12: note = 6-aminohexanoic acid
  SITE 14: note = 6-aminohexanoic acid
  SITE 16: note = 6-aminohexanoic acid
  SITE 17: note = Beta-alanine
RXRXRXRXRXRXRXRXA

SEQ ID NO: 1299 - protein, 17 aa, synthetic construct
  SITE 1: note = D-Arginine
  SITE 2: note = 6-aminohexanoic acid
  SITE 3: note = D-Arginine
  SITE 4: note = 6-aminohexanoic acid
  SITE 5: note = D-Arginine
  SITE 6: note = 6-aminohexanoic acid
  SITE 7: note = D-Arginine
  SITE 8: note = 6-aminohexanoic acid
  SITE 9: note = D-Arginine
  SITE 10: note = 6-aminohexanoic acid
  SITE 11: note = D-Arginine
  SITE 12: note = 6-aminohexanoic acid
  SITE 13: note = D-Arginine
  SITE 14: note = 6-aminohexanoic acid
  SITE 15: note = D-Arginine
  SITE 16: note = 6-aminohexanoic acid
  SITE 17: note = Beta-alanine
RXRXRXRXRXRXRXRXA

SEQ ID NO: 1300 - protein, 15 aa, synthetic construct
  SITE 2: note = 6-aminohexanoic acid
  SITE 4: note = 6-aminohexanoic acid
  SITE 6: note = 6-aminohexanoic acid
  SITE 8: note = 6-aminohexanoic acid
  SITE 10: note = 6-aminohexanoic acid
  SITE 12: note = 6-aminohexanoic acid
  SITE 14: note = 6-aminohexanoic acid
  SITE 15: note = Beta-alanine
RXRXRXRXRXRXRXA

SEQ ID NO: 1301 - protein, 11 aa, synthetic construct
  SITE 2: note = 6-aminohexanoic acid
  SITE 4: note = 6-aminohexanoic acid
  SITE 6: note = 6-aminohexanoic acid
  SITE 8: note = 6-aminohexanoic acid
  SITE 10: note = 6-aminohexanoic acid
  SITE 11: note = Beta-alanine
RXRXRXRXRXA

SEQ ID NO: 1302 - protein, 7 aa, synthetic construct
  SITE 2: note = 6-aminohexanoic acid
  SITE 4: note = 6-aminohexanoic acid
  SITE 6: note = 6-aminohexanoic acid
  SITE 7: note = Beta-alanine
RXRXRXA

SEQ ID NO: 1303 - protein, 14 aa, synthetic construct
  SITE 1: note = D-Arginine
  SITE 2: note = 6-aminohexanoic acid
  SITE 4: note = D-Arginine
  SITE 5: note = 6-aminohexanoic acid
  SITE 7: note = D-Arginine
  SITE 8: note = 6-aminohexanoic acid
  SITE 10: note = D-Arginine
  SITE 11: note = 6-aminohexanoic acid
  SITE 13: note = 6-aminohexanoic acid
  SITE 14: note = Beta-alanine
RXRRXRRXRRXRXA

SEQ ID NO: 1304 - protein, 14 aa, synthetic construct
  SITE 1: note = D-Arginine
  SITE 2: note = 6-aminohexanoic acid
  SITE 3: note = D-Arginine
  SITE 4: note = D-Arginine
  SITE 5: note = 6-aminohexanoic acid
  SITE 6: note = D-Arginine
  SITE 7: note = D-Arginine
  SITE 8: note = 6-aminohexanoic acid
  SITE 9: note = D-Arginine
  SITE 10: note = D-Arginine
  SITE 11: note = 6-aminohexanoic acid
  SITE 12: note = D-Arginine
  SITE 13: note = 6-aminohexanoic acid
  SITE 14: note = Beta-alanine
RXRRXRRXRRXRXA

SEQ ID NO: 1305 - protein, 17 aa, synthetic construct
  SITE 1: note = D-Arginine
  SITE 2: note = Beta-alanine
  SITE 3: note = D-Arginine
  SITE 4: note = Beta-alanine
  SITE 5: note = D-Arginine
  SITE 6: note = Beta-alanine
  SITE 7: note = D-Arginine
  SITE 8: note = Beta-alanine
  SITE 9: note = D-Arginine
  SITE 10: note = Beta-alanine
  SITE 11: note = D-Arginine
  SITE 12: note = Beta-alanine
  SITE 13: note = D-Arginine
  SITE 14: note = Beta-alanine
  SITE 15: note = D-Arginine
  SITE 16: note = Beta-alanine
  SITE 17: note = Beta-alanine
RARARARARARARARAA

SEQ ID NO: 1306 - protein, 15 aa, synthetic construct
  SITE 2: note = Beta-alanine
  SITE 4: note = Beta-alanine
  SITE 6: note = Beta-alanine
  SITE 8: note = Beta-alanine
  SITE 10: note = Beta-alanine
  SITE 12: note = Beta-alanine
  SITE 14: note = Beta-alanine
  SITE 15: note = Beta-alanine
RARARARARARARAA

SEQ ID NO: 1307 - protein, 11 aa, synthetic construct
  SITE 2: note = Beta-alanine
  SITE 4: note = Beta-alanine
  SITE 6: note = Beta-alanine
  SITE 8: note = Beta-alanine
  SITE 10: note = Beta-alanine
  SITE 11: note = Beta-alanine
RARARARARAA

SEQ ID NO: 1308 - protein, 7 aa, synthetic construct
  SITE 2: note = Beta-alanine
  SITE 4: note = Beta-alanine
  SITE 6: note = Beta-alanine
  SITE 7: note = Beta-alanine
RARARAA

SEQ ID NO: 1309 - protein, 17 aa, synthetic construct
  SITE 1: note = 6-aminohexanoic acid
  SITE 3: note = Beta-alanine
  SITE 5: note = Beta-alanine
  SITE 7: note = Beta-alanine
  SITE 9: note = 6-aminohexanoic acid
  SITE 11: note = Beta-alanine
  SITE 13: note = Beta-alanine
  SITE 15: note = Beta-alanine
  SITE 17: note = Beta-alanine
XRARARARXRARARARA

SEQ ID NO: 1310 - RNA, 28 nt, synthetic construct
  source 1..28: mol_type = other RNA
gggagccgggctggggctcacacggggg

SEQ ID NO: 1311 - RNA, 11 nt, synthetic construct
  source 1..11: mol_type = other RNA
aatttttggag

SEQ ID NO: 1312 - RNA, 11 nt, synthetic construct
  source 1..11: mol_type = other RNA
aatttgtctag

SEQ ID NO: 1313 - RNA, 224 nt, synthetic construct
  source 1..224: mol_type = other RNA
ggactgagtacgggtgcctgtcaggctcttgcggaagtccatgcgccattgggagggcctcggccgcggctctgtgcccttgctgctgagggccacttcctgggtcattcctggaccgggagccgggctggggctcacacgggggctcccgcgtggccgtctcggcgcctgcgtgacctccccgccggcgggatgtggcgactacgtcgggccgctgtggcctg

SEQ ID NO: 1314 - RNA, 192 nt, synthetic construct
  source 1..192: mol_type = other RNA
ggaagtccatgcgccattgggagggcctcggccgcggctctgtgcccttgctgctgagggccacttcctgggtcattcctggaccgggagccgggctggggctcacacgggggctcccgcgtggccgtctcggcgcctgcgtgacctccccgccggcgggatgtggcgactacgtcgggccgctgtggcctg

SEQ ID NO: 1315 - RNA, 224 nt, synthetic construct
  source 1..224: mol_type = other RNA
atgcgccattgggagggcctcggccgcggctctgtgcccttgctgctgagggccacttcctgggtcattcctggaccgggagccgggctggggctcacacgggggctcccgcgtggccgtctcggcgcctgcgtgacctccccgccggcgggatgtggcgactacgtcgggccgctgtggcctgggactgagtacgggtgcctgtcaggctcttgcggaagtcc

SEQ ID NO: 1316 - protein, 11 aa, Homo sapiens
MWRLRRAAVAC

SEQ ID NO: 1317 - DNA, 24 bp, Homo sapiens
  source 1..24: mol_type = genomic DNA
gggagggcctcggccgcggctctg

SEQ ID NO: 1318 - DNA, 21 bp, Homo sapiens
  source 1..21: mol_type = genomic DNA
ggaccgggagccgggctgggg

SEQ ID NO: 1319 - DNA, 28 bp, Homo sapiens
  source 1..28: mol_type = genomic DNA
gggagccgggctggggctcacacggggg

1.-393. (canceled)

394. A method of increasing expression of an OPA1 protein in a cell having a processed mRNA that encodes the OPA1 protein and that comprises a translation regulatory element that inhibits translation of the processed mRNA, the method comprising:
contacting an agent or a vector encoding the agent to the cell, wherein the agent (a) binds to a targeted portion of a full-length mature mRNA or a wild-type mature mRNA, wherein the targeted portion does not bind to a canonical or non-canonical start site; and
(b) modulates formation of a secondary mRNA structure, wherein the secondary structure is either a guanine-quadruplex or a stem loop;
thereby increasing expression of the OPA1 protein in the cell.

395. The method of claim 394, wherein the secondary structure is a guanine quadruplex (G-quad) selected from the G-quads in FIG. 3.

396. The method of claim 395, wherein the secondary structure is in a 5′ UTR of a processed mRNA.

397. The method of claim 395, wherein the secondary structure involves base-pairing with at least one nucleotide of the main start codon of the processed mRNA.

398. The method of claim 397, wherein the agent inhibits the base-pairing with the at least one nucleotide of the main start codon of the processed mRNA.

399. The method of claim 394, wherein the targeted portion is at least 42 nucleotides upstream of the main start codon of the processed mRNA.

400. The method of claim 399, wherein the main start codon is defined by chromosomal coordinates GRCh38 chr3: 193,593,378-193,593,380.

401. The method of claim 399, wherein the targeted portion is within exon 1 of the full-length mature mRNA.

402. The method of claim 394, wherein the translation regulatory element comprises an upstream start codon.

403. The method of claim 402, wherein the agent promotes formation of a secondary mRNA structure that involves base-pairing with at least one nucleotide of the upstream start codon.

404. The method of claim 395, wherein the agent inhibits formation of the Guanine quadruplex formed by a G-rich sequence of the processed mRNA.

405. The method of claim 404, wherein the G-rich sequence comprises at least a portion of 5′ untranslated region (5′ UTR) of the processed mRNA.

406. The method of claim 394, wherein the agent increases the expression of the OPA1 protein in the cell by increasing the translation efficiency and/or rate of translation of a full-length mature mRNA or a wild-type mature mRNA.

407. The method of claim 394, wherein the translation efficiency and/or rate of translation of the processed mRNA that encodes the OPA1 protein in the cell contacted with the agent or the vector encoding the agent is increased by at least 1.1 fold.

408. The method of claim 394, wherein the agent is an antisense oligonucleotide.

409. The method of claim 408, wherein the antisense oligomer comprises a sequence with at least 90% sequence identity to a sequence selected from the group consisting of SEQ ID NOs: 608-1253.

410. The method of claim 408, wherein the antisense oligomer comprises a phosphorodiamidate morpholino, a locked nucleic acid, a peptide nucleic acid, a 2′-O-methyl moiety, a 2′-Fluoro moiety, or a 2′-O-m ethoxy ethyl moiety.

411. The method of claim 408, wherein the antisense oligomer comprises at least one modified sugar moiety.

412. The method of claim 408, wherein the antisense oligomer consists of from 8 to 25 nucleobases.

413. The method of claim 394, wherein the viral vector comprises an adenoviral vector, adeno-associated viral (AAV) vector, lentiviral vector, Herpes Simplex Virus (HSV) viral vector, or retroviral vector.
